(19) United States
(12) Patent Application Publication
(10) Pub. No.: US 2021/0063401 A1
(43) Pub. Date: Mar. 4, 2021

(54) METHODS AND MATERIALS FOR ASSESSING AND TREATING CANCER

(71) Applicant: The Johns Hopkins University, Baltimore, MD (US)

(72) Inventors: Bert Vogelstein, Baltimore, MD (US); Kenneth W. Kinzler, Baltimore, MD (US); Qing Wang, Owings Mills, MD (US); Nickolas Papadopoulos, Towson, MD (US); Ming Zhang, Owings Mills, MD (US)

(21) Appl. No.: 16/765,343

(22) PCT Filed: Nov. 20, 2018
(86) PCT No.: PCT/US2018/062007

§ 371 Date: May 19, 2020

Related U.S. Application Data
(60) Provisional application No. 62/588,654, filed on Nov. 20, 2017.

(51) Int. Cl. G01N 33/574

(52) U.S. Cl. CPC G01N 33/57449; G01N 2333/99

(57) ABSTRACT

This document provides methods and materials for identifying biomarkers (e.g., peptide biomarkers) that can be used to identify a mammal as having a disease (e.g., cancer). This document also provides methods and materials for identifying and/or treating cancer. For example, this document provides methods and materials for using one or more peptide fragments derived from a peptidyl-prolyl cis-trans isomerase A (PPIA) polypeptide to identify a mammal as having cancer (e.g., ovarian cancer).

### CROSS-REFERENCE To RELATED APPLICATIONS

[0001] This application claims the benefit of U.S. Patent Application Ser. No. 62/588,654, filed on Nov. 20, 2017. The disclosure of the prior application is considered part of (and is incorporated by reference in) the disclosure of this application.

### BACKGROUND

### 1. Technical Field

[0002] This document provides methods and materials for identifying biomarkers (e.g., peptide biomarkers) that can be used to identify a mammal as having a disease (e.g., cancer). This document also provides methods and materials for identifying and/or treating cancer. For example, this document provides methods and materials for using one or more peptide fragments derived from a peptidyl-prolyl cis-trans isomerase A (PPIA) polypeptide to identify a mammal as having cancer (e.g., ovarian cancer).

### 2. Background Information

[0003] Nearly a quarter of a million women will be diagnosed with ovarian cancer this year, and more than 140,000 women will die from their disease (Howlader et al. 2014 SEER Cancer Statistics Review, 1975-2011 (National Cancer Institute, Bethesda)). If ovarian cancer is diagnosed and treated at early stages, before the cancer has spread outside the ovary, the 5-y relative survival rate is over 90% (Howlader et al. 2014 SEER Cancer Statistics Review, 1975-2011 (National Cancer Institute, Bethesda)). However, only 15% of all ovarian cancers are found at such early stages and the prognosis for patients whose cancers are discovered at late stages is dismal (Howlader et al. 2014 SEER Cancer Statistics Review, 1975-2011 (National Cancer Institute, Bethesda)). There is thus a widely recognized need for the development of biomarkers that could potentially detect ovarian cancers earlier. There have been numerous attempts to use conventional biomarkers, such as CA-125 or HE-4, or to use ultrasound, for such detection (Fishman et al. 2005 Am J Obstet Gynecol 192:1214-1221; Li et al. 2009 Expert Rev Mol Diagn 9:555-566; Scholler et al. 2007 Biomarkers Med 1:513-523; and Van Gorp et al. 2011 Br J Cancer 104:863-870). Although some show promise, none of them is recommended for screening by the US Preventive Services Task Force because they too frequently lead to “important harms, including major surgical interventions in women who do not have cancer” (Moyer et al. 2012 Ann Intern Med 157:900-904).

### SUMMARY

[0004] This document provides methods and materials for identifying and/or treating cancer. In some cases, this document provides materials and methods for using one or more PPIA peptide fragments to identify a mammal as having cancer (e.g., ovarian cancer). For example, an elevated level of one or more PPIA peptide fragments in a sample (e.g., a non-invasive sample such as a blood sample) can be used to identify a mammal as having ovarian cancer. For example, a mammal identified as having cancer (e.g., ovarian cancer) based, at least in part, on an elevated level of one or more circulating peptide biomarkers (e.g., one or more PPIA peptide fragments) can be treated with one or more cancer treatments.

[0005] This document also provides methods and materials for identifying and/or validating peptide biomarkers (e.g., circulating peptide biomarkers) that can be used as biomarkers to identify a mammal as having cancer. In some cases, a plurality of circulating peptide biomarkers can be identified using a combination of qualitative and quantitative mass spectrometry (MS) techniques. For example, global plasma proteomic profiling of samples from cancer patients and healthy individuals can be used to identify candidate peptide biomarkers, and each candidate peptide biomarker can be evaluated by sequential analysis of fractionated eluates by selected reaction monitoring (SAFE-SRM) to validate the candidate peptide marker(s). In some cases, one or more peptides identified herein (e.g., one or more circulating peptide biomarkers), can be used to identify a mammal having a disease (e.g., cancer) as described herein.

[0006] As demonstrated herein, SAFE-SRM can be used for the discovery and validation of circulating (e.g., in the blood) peptide biomarkers for cancer. Several hundred candidate peptide biomarkers were identified through comparison of proteolytic peptides derived from the plasma of cancer patients and proteolytic peptides derived from healthy individuals, and 2D chromatography coupled with SRM was used to validate a smaller number of candidate peptide biomarkers that might prove diagnostically useful. As demonstrated herein, this approach was applied to plasma from cancer patients, and two peptides encoded by the PPIA gene were discovered whose abundance was increased in the plasma of ovarian cancer patients but not in healthy controls. This approach can be generally applied to the discovery of proteins and peptide biomarkers characteristic of any disease and/or various disease states.

[0007] Having the ability to identify peptide biomarkers in a high-throughput, robust, and reproducible system which includes validation of candidate peptide biomarkers provides a unique and unrealized opportunity to identify and validate a large number of candidate peptide biomarkers in a quantitative and massively parallel manner. In addition, having the ability to detect circulating peptide biomarkers in a blood sample provides a unique and unrealized opportunity to identify a mammal as having a cancer at earlier stages than can be achieved using conventional methods and/or using a non-invasive sample manner.

[0008] In general, one aspect of this document features a method for treating ovarian cancer. The method includes, or consists essentially of, detecting an elevated level of one or more peptide biomarkers comprising a peptide fragment derived from a PPIA polypeptide in a blood sample obtained from a mammal, and administering one or more cancer treatments to said mammal. The one or more cancer treatments can include surgery, chemotherapy, hormone therapy, targeted therapy, radiation therapy, or any combinations thereof. The mammal can be a human. The blood sample can be a plasma sample. The PPIA peptide fragment can include the amino acid sequence VSFELFADK (SEQ ID NO: 1). The PPIA peptide fragment can include the amino acid sequence FEDENFILK (SEQ ID NO: 2).

[0009] In another aspect, this document features a method for identifying a mammal as having ovarian cancer. The method includes, or consists essentially of, detecting a level of one or more blood peptide-biomarkers comprising a peptide fragment derived from a PPIA polypeptide in a blood sample obtained from said mammal, and diagnosing said mammal with ovarian cancer when an elevated level of the one or more blood peptide-biomarkers is detected in said blood sample. The mammal can be a human. The blood sample can be a plasma sample. The PPIA peptide fragment can include the amino acid sequence VSFELFADK (SEQ ID NO: 1). The PPIA peptide fragment can include the amino acid sequence FEDENFILK (SEQ ID NO: 2).

[0010] In another aspect, this document features a method for identifying a peptide biomarker. The method includes, or consists essentially of, digesting polypeptides present in a disease blood sample to obtain disease peptide fragments and labeling the disease peptide fragments with a first heavy isotope to obtain labeled disease peptide fragments; digesting polypeptides present in a reference blood sample to obtain reference peptide fragments and labeling the reference peptide fragments with a second heavy isotope to obtain labeled reference peptide fragments; and subjecting the labeled disease peptide fragments and the labeled reference peptide fragments to mass spectrometry to identify a peptide biomarker, where the level of the peptide biomarker is elevated in the labeled disease peptide fragments relative to the labeled reference peptide fragments. The disease blood sample can include blood from one or more mammals having the disease. The disease blood samples can include blood from a plurality of mammals having the disease. The reference blood sample can include blood from one or more healthy mammals. The reference blood sample can include blood from a plurality of healthy mammals. The method also can include depleting one or more highly abundant blood proteins from each sample. The highly abundant blood proteins can be albumin, IgG, α1-antitrypsin, IgA, IgM, transferrin, haptoglobin, α2-macroglobulin, fibrinogen, complement C3, α1-acid glycoprotein, apolipoprotein A-I, apolipoprotein A-II, apolipoprotein B, or any combinations thereof. The method also can include, prior to each digestion step, enriching glycoproteins in each sample. The mass spectrometry can be performed using an Orbitrap mass spectrometer.

[0011] In another aspect, this document features a method for validating a peptide biomarker. The method includes, or consists essentially of, subjecting a plurality of peptides, including the peptide biomarker, to basic pH reversed-phase liquid chromatography (bRPLC) to obtain a plurality of fractions; organizing the plurality of fractions into a plurality of fraction groups, where the number of fractions is higher than the number of fraction groups; separating peptide biomarkers in each fraction group by orthogonal high performance liquid chromatography (HPLC) at acidic pH to obtain continuous HPLC elutes; and analyzing said continuous HPLC elutes using a selected reaction monitoring (SRM) method including preoptimized transitions and preoptimized dwell times for the peptide biomarker to determine the intensity of the peptide biomarker; where the peptide biomarker is validated when the peptide biomarker is detected and quantitated at an elevated level in a disease sample relative to a reference sample using the SRM method. The method optimized dwell time for the peptide biomarker can be inversely proportional to the intensity of the peptide biomarker. The HPLC can be performed with a device that is coupled to a mass spectrometer. The mass spectrometer can be a triple quadrupole mass spectrometer. The collision energy can be any one of the collision energies set forth in Dataset S5. The dwell time can be any one of the dwell times set forth in Dataset S5.

[0012] In another aspect, this document features a method for identifying and validating a peptide biomarker. The method includes, or consists essentially of, identifying a candidate peptide biomarker, building a SAFE-SRM method for the candidate peptide biomarker, and using the SAFE-SRM method to validating the candidate peptide biomarker.

[0013] Identifying a candidate peptide biomarker can include, or consists essentially of, digesting polypeptides present in a disease blood sample to obtain disease peptide fragments, labeling the disease peptide fragments with a first heavy isotope to obtain labeled disease peptide fragments, digesting polypeptides present in a reference blood sample to obtain reference peptide fragments, labeling the reference peptide fragments with a second heavy isotope to obtain labeled reference peptide fragments, and subjecting the labeled disease peptide fragments and the labeled reference peptide fragments to mass spectrometry to identify a candidate peptide biomarker, where the level of the candidate peptide biomarker is elevated in the labeled disease peptide fragments relative to the labeled reference peptide fragments. Building a SAFE-SRM method can include, or consists essentially of,
[0014] synthesizing the candidate peptide biomarker, subjecting the synthetic candidate peptide biomarker to mass spectrometry to determine a candidate peptide biomarker transition, where the transition is determined by identifying a precursor-product ion pair having a strongest intensity and identifying a collision energy (CE) producing the precursor-product ion pair, subjecting a plurality of peptides including the candidate peptide biomarker to bRPLC to obtain a plurality of fractions, where the plurality consists of essentially equal amounts of each peptide, organizing the plurality of fractions into a plurality of fraction groups, where the number of fractions is higher than the number of fraction groups, determining an intensity of said candidate peptide biomarker in each of the fraction groups using the candidate peptide biomarker transition and a fixed dwell time, and optimizing the dwell time by re-assembling the transitions according to their hydrophobicity at high pH. Validating said candidate peptide biomarker can include, or consists essentially of, quantitating the candidate peptide biomarker in the disease blood sample, by subjecting said disease peptide fragments comprising said candidate peptide biomarkers to bRPLC to obtain a plurality of fractions, organizing said plurality of fractions into a plurality of fraction groups, where the number of fractions is higher than the number of fraction groups, separating peptides in each fraction group by orthogonal HPLC at acidic pH to obtain continuous HPLC elutes, and analyzing the continuous HPLC elutes using a SRM method including the candidate peptide biomarker transition and the optimized dwell time; and quantitating the candidate peptide marker in the reference blood sample by subjecting the reference peptide fragments to bRPLC to obtain a plurality of fractions, organizing the plurality of fractions into a plurality of fraction groups, where the number of fractions is higher than the number of fraction groups, separating peptides in each fraction group by orthogonal HPLC at acidic pH to obtain continuous HPLC elutes, and analyzing said continuous HPLC elutes using the SRM method including the candidate peptide biomarker transition and the optimized dwell time; and validating the candidate peptide biomarker when the candidate peptide biomarker is quantitated at an elevated level in the disease sample relative to the reference sample. The synthesized candidate peptide biomarkers can be not labeled with a heavy isotope. The optimized dwell time for the peptide biomarker is determined using synthetic biomarker peptides spiked and present in a sample obtained from a subject. The method optimized dwell time for the peptide biomarker can be inversely proportional to the intensity of the peptide biomarker. The HPLC can be performed with a device that is coupled to a mass spectrometer. The mass spectrometer can be a triple quadrupole mass spectrometer. The collision energy can be any one of the collision energies set forth in Dataset S5. The dwell time can be any one of the dwell times set forth in Dataset S5.

[0015] Unless otherwise defined, all technical and scientific terms used herein have the same meaning as commonly understood by one of ordinary skill in the art to which this invention pertains. Although methods and materials similar or equivalent to those described herein can be used to practice the invention, suitable methods and materials are described below. All publications, patent applications, patents, and other references mentioned herein are incorporated by reference in their entirety. In case of conflict, the present specification, including definitions, will control. In addition, the materials, methods, and examples are illustrative only and not intended to be limiting.

[0016] The details of one or more embodiments of the invention are set forth in the accompanying drawings and the description below. Other features, objects, and advantages of the invention will be apparent from the description and drawings, and from the claims.

### DESCRIPTION OF THE DRAWINGS

[0017] FIG. 1 contains schematics of workflow of plasma biomarker identification and validation. Plasma biomarker discovery and identification were conducted through labeling-dependent quantitative proteomics, such as iTRAQ or TMT assays (A); plasma biomarker validation was conducted through SAFE-SRM (B).

[0018] FIG. 2 shows peptide detectability by SAFE-SRM in complex samples. Six heavy-isotope-labeled peptides (peptide 1: IQLVEEELDR* (SEQ ID NO:3); peptide 2: VILHLK* (SEQ ID NO:4); peptide 3: IILLFDAHK* (SEQ ID NO:5); peptide 4: TLAESALQLLYTAK* (SEQ ID NO:6); peptide 5: LLGHLVK* (SEQ ID NO:7); peptide 6: GLVGEIIK* (SEQ ID NO:8), where * indicates C13 and N15 heavy-isotope-labeled amino acids) were synthesized and used to evaluate the sensitivity of SAFESRM in detecting low amount of peptides in complex samples. One femtomole of each peptide was detected by conventional SRM (A). However, when 1 fmol of these peptides was added to trypsin-digested plasma samples, they were much more difficult to detect (B). bRPLC fractionation was able to increase the sensitivity of standard SRM, but with a large variance between runs (C). SAFE-SRM with optimized dwell and cycling time allowed detection of all six peptides, at intensities averaging 70% of the intensities of the free peptides (D).

[0019] FIG. 3 shows ovarian cancer prediction by peptide biomarkers. (A) Mean square errors (MSEs) of ovarian cancer prediction of all 318 peptides are plotted with the peptides ranked by MSE from the best predictors to the worst predictors. (B) The 10 best peptide biomarkers are shown; the peptide VSFELFADK from peptidyl-prolyl cis-trans isomerase A was the best predictor. (C) The ovarian cancer prediction performance of PPIA peptide VSFELFADK was further improved by combining with another peptide, FEDENFILK (SEQ ID NO:2), from the same protein.

[0020] FIG. 4 contains a detailed technical workflow for iTRAQ-labeling-based quantitative proteomics studies with total plasma proteome (A) and plasma glycoproteome (B).

[0021] FIG. 5 contains a SAFE-SRM scheme. (A) bRPLC fractionation was performed to separate peptides from a complicated biological sample into 96 fractions according to their hydrophobicity at high pH. The SAFE-SRM fraction groups are overlaid on the wells. (B) A chromatogram showing the combined signal intensities of all peptides in each of the 20 SAFE-SRM fraction groups used in the final SAFE-SRM method. (C) SAFE-SRM method transition coverages. For each fraction group i, the specific SAFE-SRM method i is composed of the transitions detecting peptides within that fraction group and two adjacent groups, group i−1 and group i+1, where i ∈.

[0022] FIG. 6 contains SAFE-SRM profiles for three ovarian cancer biomarker peptides in eight plasma samples. Four ovarian cancer plasma samples (253, 256, 260, and 271) and four normal healthy plasma samples (202, 205, 207, and 209) were analyzed by SAFE-SRM. The areas under the peak are shown for each sample.

[0023] FIG. 7 contains a comparison of ovarian cancer diagnostic performance using SAFE-SRM-based PPIA assay and ELISA-based CA125 assay. The Venn diagram shows the number of cases identified in a cohort of 63 ovarian cancer patients.

[0024] FIG. 8 contains MS spectra of SAFE-SRM target peptides from PPIA.

[0025] FIG. 9 contains MA plots for whole-plasma iTRAQ datasets. Nonnormalized peptide intensities from each of the three experiments were compared under each specific labeling (114, 115, 116, and 117) and corresponding MA plots were generated using the log-transformed raw intensities, with A ranges fixed to 6-14, and M ranges fixed to −4 to 4. There is no clear evidence of bias associated with any of the datasets. The technical variance (I-L) is significantly smaller than the biological variance (A-D or E-H).

[0026] FIG. 10 shows nonnormalized and median normalized histograms for cancer vs. normal in three datasets. Protein ratios of cancers/normal were plotted using log2 scale for dataset 1 (A-C, Upper), dataset 2 (A-C, Middle), and dataset 3 (A-C, Lower). After median normalization, the same protein ratios of cancers/normal were plotted using log2 scale for dataset 1 (D-F, Upper), dataset 2 (D-F, Middle), and dataset 3 (D-F, Lower). The log2 (relative ratio)=0 lines are indicated in each plot (red line). Biased data were observed for colorectal cancer (B) and ovarian cancer (C). The bias for pancreatic cancer (A) is not obvious.

### DETAILED DESCRIPTION

[0027] This document provides methods and materials for identifying and/or treating a disease. In some cases, the disease is cancer. For example, a mammal having an elevated level of one or more circulating peptide biomarkers (e.g., PPIA peptide fragments) can be identified as having cancer (e.g., ovarian cancer) and, optionally, can be administered one or more cancer treatments. As used herein a “circulating peptide” is a peptide that can be detected in any closed system (e.g., the circulatory system) within the body of a mammal. In some cases, a blood sample (e.g., a plasma sample) from a mammal (e.g., a mammal suspected as having cancer) can be assessed for an elevated level of one or more PPIA peptide fragments, and when an elevated level of one or more PPIA peptide fragments is detected, the mammal can be identified as having cancer, and, optionally, the mammal can be administered one or more cancer treatments to reduce the severity of the cancer and/or to reduce a symptom of the cancer.

[0028] The term “elevated level” as used herein with respect to a level of a circulating peptide biomarker (e.g., a PPIA peptide fragment) refers to any level that is greater than the reference level of the circulating peptide (e.g., PPIA peptide fragment) typically observed in a sample (e.g., a reference sample) from one or more healthy mammals (e.g., mammals that do not have a cancer). In some cases, a reference sample can be a sample obtained from a mammal that does not exhibit the disease that is associated with an elevated level of a circulating peptide. For example, for a peptide biomarker associated with ovarian cancer, a reference sample can be a sample obtained from a subject that does not have ovarian cancer. In some cases, a reference sample can be a sample obtained from the same mammal in which the elevated level of a peptide biomarker is observed, where the reference sample was obtained prior to onset of the disease that is associated with an elevated level of a circulating peptide. In some cases, such a reference sample obtained from the same mammal is frozen or otherwise preserved for future use as a reference sample. In some cases, an elevated level of one or more PPIA fragments can be assessed based on an abundance score thresholds as described herein (see, e.g., Examples 1 and Dataset S7). In some cases, when reference samples have undetectable levels of a circulating peptide biomarker, an elevated level can be any detectable level of the circulating peptide biomarker. It will be appreciated that levels from comparable samples are used when determining whether or not a particular level is an elevated level.

[0029] Any appropriate mammal can be assessed and/or treated as described herein. For example, humans or other primates such as monkeys can be assessed for an elevated level of one or more PPIA peptide fragments and, optionally, can be treated with one or more cancer treatments to reduce the number of cancer cells present within the human or other primate. In some cases, dogs, cats, horses, cows, pigs, sheep, mice, and rats having cancer can be assessed for an elevated level of one or more PPIA peptide fragments, and, optionally, can be treated with one or more cancer treatments to reduce the number of cancer cells present within the human or other primate as described herein.

[0030] Any appropriate sample from a mammal can be assessed as described herein (e.g., assessed for an elevated level of one or more circulating peptide biomarkers). Examples of samples that can contain circulating peptide biomarkers include, without limitation, blood samples (e.g., whole blood, serum, or plasma samples), blood, plasma, urine, cerebrospinal fluid, saliva, sputum, broncho-alveolar lavage, bile, lymphatic fluid, cyst fluid, stool, and ascites. In some cases, a sample can be a plasma sample.

[0031] The one or more circulating peptide biomarkers can be any appropriate circulating peptide biomarker. In some cases, circulating peptide biomarkers are identified and validated using any of the methods described herein (e.g., using a SAFE-ARM method). The one or more PPIA peptide fragments can include any appropriate PPIA peptide fragments. Examples of PPIA peptide fragments include, without limitation, peptide fragments that include the amino acid sequence VSFELFADK (SEQ ID NO: 1) and peptide fragments that include the amino acid sequence FEDENFILK (SEQ ID NO: 2).

[0032] Any appropriate method can be used to detect an elevated level of one or more circulating peptide biomarkers. Examples of methods for detecting peptide levels include, without limitation, spectrometry methods (e.g., high-performance liquid chromatography (HPLC) and liquid chromatography-mass spectrometry (LC/MS)), antibody dependent methods (e.g., enzyme-linked immunosorbent assay (ELISA), protein immunoprecipitation, immunoelectrophoresis, western blotting, and protein immunostaining), and aptamer dependent methods. In some cases, one or more circulating peptide biomarkers (e.g., one or more PPIA peptide fragments) can be detecting using mass spectrometry techniques.

[0033] In some cases, a mammal identified as having cancer as described herein (e.g., based at least in part on an elevated level of one or more circulating peptide biomarkers) can have the cancer diagnosis confirmed using any appropriate method. Examples of methods that can be used to diagnose a cancer include, without limitation, physical examinations (e.g., pelvic examination), imaging tests (e.g., ultrasound or CT scans), blood tests (e.g., for markers such as CA 125), tissue tests (e.g., biopsy).

[0034] Once identified as having a cancer as described herein (e.g., based at least in part on an elevated level of one or more circulating peptide biomarkers such as PPIA peptide fragments), a mammal can be treated with one or more cancer treatments. The one or more cancer treatments can include any appropriate cancer treatments. A cancer treatment can include surgery. In cases where the cancer is ovarian cancer, surgery can include removal of one or both ovaries, the fallopian tubes, the uterus, nearby lymph nodes, and/or nearby fatty abdominal tissue (omentum). A cancer treatment can include radiation therapy. A cancer treatment can include administration of a pharmacotherapy such chemotherapy, hormone therapy, targeted therapy, and/or cytotoxic therapy. Examples of cancer treatments include, without limitation, platinum compounds (such as cisplatin or carboplatin), taxanes (such as paclitaxel or docetaxel), albumin bound paclitaxel (nab-paclitaxel), altretamine, capecitabine, cyclophosphamide, etoposide (vp-16), gemcitabine, ifosfamide, irinotecan (cpt-11), liposomal doxorubicin, melphalan, pemetrexed, topotecan, vinorelbine, luteinizing-hormone-releasing hormone (LHRH) agonists (such as goserelin and leuprolide), anti-estrogen therapy (such as tamoxifen), aromatase inhibitors (such as letrozole, anastrozole, and exemestane), angiogenesis inhibitors (such as bevacizumab), poly(ADP)-ribose polymerase (PARP) inhibitors (such as olaparib, rucaparib, and niraparib), external beam radiation therapy, brachytherapy, radioactive phosphorus, and any combinations thereof.

[0035] Any appropriate cancer can be identified and/or treated as described herein. Examples of cancers that can be treated as described herein include, without limitation, lung cancer (e.g., small cell lung carcinoma or non-small cell lung carcinoma), papillary thyroid cancer, medullary thyroid cancer, differentiated thyroid cancer, recurrent thyroid cancer, refractory differentiated thyroid cancer, lung adenocarcinoma, bronchioles lung cell carcinoma, multiple endocrine neoplasia type 2A or 2B (MEN2A or MEN2B, respectively), pheochromocytoma, parathyroid hyperplasia, breast cancer, colorectal cancer (e.g., metastatic colorectal cancer), papillary renal cell carcinoma, ganglioneuromatosis of the gastroenteric mucosa, inflammatory myofibroblastic tumor, or cervical cancer, acute lymphoblastic leukemia (ALL), acute myeloid leukemia (AML), cancer in adolescents, adrenal cancer, adrenocortical carcinoma, anal cancer, appendix cancer, astrocytoma, atypical teratoid/rhabdoid tumor, basal cell carcinoma, bile duct cancer, bladder cancer, bone cancer, brain stem glioma, brain tumor, breast cancer, bronchial tumor, Burkitt lymphoma, carcinoid tumor, unknown primary carcinoma, cardiac tumors, cervical cancer, childhood cancers, chordoma, chronic lymphocytic leukemia (CLL), chronic myelogenous leukemia (CML), chronic myeloproliferative neoplasms, colon cancer, colorectal cancer, craniopharyngioma, cutaneous T-cell lymphoma, bile duct cancer, ductal carcinoma in situ, embryonal tumors, endometrial cancer, ependymoma, esophageal cancer, esthesioneuroblastoma, Ewing sarcoma, extracranial germ cell tumor, extragonadal germ cell tumor, extrahepatic bile duct cancer, eye cancer, fallopian tube cancer, fibrous histiocytoma of bone, gallbladder cancer, gastric cancer, gastrointestinal carcinoid tumor, gastrointestinal stromal tumors (GIST), germ cell tumor, gestational trophoblastic disease, glioma, hairy cell tumor, hairy cell leukemia, head and neck cancer, heart cancer, hepatocellular cancer, histiocytosis, Hodgkin's lymphoma, hypopharyngeal cancer, intraocular melanoma, islet cell tumors, pancreatic neuroendocrine tumors, Kaposi sarcoma, kidney cancer, Langerhans cell histiocytosis, laryngeal cancer, leukemia, lip and oral cavity cancer, liver cancer, lung cancer, lymphoma, macroglobulinemia, malignant fibrous histiocytoma of bone, osteocarcinoma, melanoma, Merkel cell carcinoma, mesothelioma, metastatic squamous neck cancer, midline tract carcinoma, mouth cancer, multiple endocrine neoplasia syndromes, multiple myeloma, mycosis fungoides, myelodysplastic syndromes, myelodysplastic/myeloproliferative neoplasms, myelogenous leukemia, myeloid leukemia, multiple myeloma, myeloproliferative neoplasms, nasal cavity and paranasal sinus cancer, nasopharyngeal cancer, neuroblastoma, non-Hodgkin's lymphoma, non-small cell lung cancer, oral cancer, oral cavity cancer, lip cancer, oropharyngeal cancer, osteosarcoma, ovarian cancer, pancreatic cancer, papillomatosis, paraganglioma, paranasal sinus and nasal cavity cancer, parathyroid cancer, penile cancer, pharyngeal cancer, pheochromosytoma, pituitary cancer, plasma cell neoplasm, pleuropulmonary blastoma, pregnancy and breast cancer, primary central nervous system lymphoma, primary peritoneal cancer, prostate cancer, rectal cancer, renal cell cancer, retinoblastoma, rhabdomyosarcoma, salivary gland cancer, sarcoma, Sezary syndrome, skin cancer, small cell lung cancer, small intestine cancer, soft tissue sarcoma, squamous cell carcinoma, squamous neck cancer, stomach cancer, T-cell lymphoma, testicular cancer, throat cancer, thymoma and thymic carcinoma, thyroid cancer, transitional cell cancer of the renal pelvis and ureter, unknown primary carcinoma, urethral cancer, uterine cancer, uterine sarcoma, vaginal cancer, vulvar cancer, Waldenstrom Macroglobulinemia, and Wilms' tumor. In some cases, the materials and methods described herein can be used to identify and/or treat ovarian cancer.

[0036] In another aspect, this document also provides methods and materials for identifying and/or validating peptide biomarkers (e.g., circulating peptide biomarkers) that can be used to identify a mammal as having a disease and/or disease stage. In some cases, methods and materials provided herein can be used for identifying and/or validating peptide biomarkers (e.g., circulating peptide biomarkers) that can be used to identify a mammal as having cancer.

[0037] Methods and materials described herein can be used for identifying a peptide biomarker (e.g., a circulating peptide biomarker). In some cases, methods for identifying circulating peptide biomarkers can include identifying circulating peptide biomarkers that are elevated in a disease sample as compared to a control sample (e.g., a reference sample). In some cases, a disease sample can include blood from one or more (e.g., 2, 3, 5, 8, 10, 11, 12, 13, 14, 15, 16, 17, 18, 19, 20, 25, 30, 35, 40, 50, 60, 70, 80, 90, 100 or more) mammals having a disease. In some cases, a disease sample can include blood from a single mammal. In some cases, a control sample can include blood from one or more (e.g., 2, 3, 5, 8, 10, 11, 12, 13, 14, 15, 16, 17, 18, 19, 20, 25, 30, 35, 40, 50, 60, 70, 80, 90, 100 or more) healthy mammals (e.g., mammals that do not have a disease). In some cases, a control sample can include blood from a single mammal. In some cases, a method for identifying one or more circulating peptide biomarkers can include digesting polypeptides present in a disease blood sample into peptide fragments to obtain a sample of disease peptide fragments; and digesting polypeptides present in a reference blood sample into peptide fragments to obtain a sample of reference peptide fragments. In some cases, the peptide fragments from a digested sample (e.g., the disease peptide fragments or the reference peptide fragments) can be differentially labeled. For example, the peptide fragments from a disease blood sample can remain label-free and the peptide fragments from a reference sample can be labeled with a heavy isotope, or vice versa. For example, the peptide fragments from a disease blood sample and the peptide fragments from a reference sample can be labeled with different heavy isotopes. In some cases, one or more (e.g., 2, 3, 4, 5, or more) samples from different diseases (e.g., different cancer types) or different disease stages (e.g., a first disease sample being an early disease sample and a second disease sample being an advanced disease sample) can be used, and each sample (e.g., each disease sample and the control sample) can each be labelled with a difference heavy isotope. Examples of heavy isotopes include, without limitation, deuterium, C13, N15, and O18. When the peptide fragments from a disease blood sample and the peptide fragments from a reference sample are not labeled, the disease peptide fragments and the reference peptide fragments can be subjected to mass spectrometry (e.g., independently subjected to mass spectrometry as separate runs), and the results can be compared to identify one or more peptide biomarkers (e.g., peptides that are elevated in the disease sample relative to the reference sample). When the peptide fragments from a disease blood sample and the peptide fragments from a reference sample are differentially labeled, the labeled disease peptide fragments and the labeled reference peptide fragments can be subjected to mass spectrometry (e.g., as a single mass spectrometry run) to identify one or more peptide biomarkers (e.g., peptides that are elevated in the disease sample relative to the reference sample).

[0038] Any appropriate mass spectrometer can be used. Examples of mass spectrometers include, without limitation, an Orbitrap mass spectrometer and a triple quadrupole mass spectrometer, time-of-flight (TOF), matrix-assisted laser desorption/ionization (MALDI)-TOF, and surface-enhanced laser desorption/ionization (SELDI)-TOF. For example, an Orbitrap mass spectrometer can be used when identifying one or more peptide biomarkers as described herein.

[0039] Any appropriate method for digesting polypeptides can be used. In some cases, polypeptides can be enzymatically digested. In some cases, polypeptides can be chemically digested. For example, polypeptides can be digested using, without limitation, Arg-C, Asp-N, Asp-N (N-terminal Glu), BNPS or NCS/urea, Caspase-1, Caspase-10, Caspase-2, Caspase-3, Caspase-4, Caspase-5, Caspase-6, Caspase-7, Caspase-8, Caspase-9, Chymotrypsin, Chymotrypsin (low specificity), Clostripain, CNBr, CNBr (methyl-Cys), CNBr (with acids), Enterokinase, Factor Xa, Formic acid, Glu-C (AmAc buffer), Glu-C (Phos buffer), Granzyme B, HRV3C protease, Hydroxylamine, Iodosobenzoic acid, Lys-C, Lys-N, Lys-N (Cys modified), Mild acid hydrolysis, NBS (long exposure), NBS (short exposure), NTCB, Pancreatic elastase, Pepsin A, Pepsin A (low specificity), Prolyl endopeptidase, Proteinase K, TEV protease, Thermolysin, Thrombin, Trypsin and/or hydrolysis.

[0040] In some cases, methods for identifying one or more circulating peptide biomarkers can include reducing or eliminating circulating proteins that are present in high abundance from the disease sample and/or the control sample. Examples of circulating proteins that are present in high abundance include, without limitation, albumin, immunoglobulins (e.g., IgG IgA, and IgM), α1-antitrypsin, transferrin, haptoglobin, α2-macroglobulin, fibrinogen, complement C3, α1-acid glycoprotein (Orosomucoid), high-density lipoproteins (HDLs; e.g., apolipoproteins A-I and A-II), and low-density lipoproteins (LDLs; e.g., apolipoprotein B). Circulating proteins that are present in high abundance can be reduced or eliminated using any appropriate technique. Circulating proteins can be reduced or eliminated using any appropriate technique. Examples of means for reducing or eliminating circulating proteins include, without limitation, cibacron blue dye and antibody-based plasma depletion. For example, circulating proteins that are present in high abundance can be reduced or eliminated by antibody-based plasma depletion.

[0041] In some cases, methods for identifying one or more circulating peptide biomarkers can include enriching circulating proteins that are present in low abundance from the disease sample and/or the control sample. For example, low abundance proteins can be enriched using a peptide ligand library (see, e.g., the strategy in ProteoMiner protein enrichment kit) or using aptamers.

[0042] In some cases, methods for identifying one or more circulating peptide biomarkers can include denaturing, reducing, and/or alkylating the peptide fragments from a disease blood sample and/or a control sample. For example, peptides can be denatured using urea, sodium dodecyl sulfate (SDS), methanol, glycerol, and/or heat. For example, peptides can be reduced using tris-(2-carboxyethyl)phosphine (TCEP), dithiothreitol (DTT), and/or 2-mercaptoethanol. For example, peptides can be alkylated using methyl methanethiosulfonate (MMTS), iodoacetamide, and/or iodoacetate.

[0043] In some cases, methods for identifying one or more circulating peptide biomarkers can include enriching glycoproteins, phosphorylated proteins, and/or proteins bearing other post-translation modifications in each sample.

[0044] Methods and materials described herein can be used for validating a peptide biomarker (e.g., a circulating peptide biomarker). In some cases, methods for validating one or more circulating peptide biomarkers can include validating circulating peptide biomarkers that have been identified according to any of the variety of methods described herein. Methods for validating a peptide biomarker (e.g., a circulating peptide biomarker) can include a sequential analysis of fractionated eluates by selected reaction monitoring SRM (SAFE-SRM). In some cases, a peptide biomarker can be validated using a SRM method including preoptimized transitions and/or preoptimized dwell times (e.g., to determine the intensity of the peptide biomarker). In some cases, a peptide biomarker can be validated by building a SRM method having optimized transitions and/or optimized dwell times for determining the intensity of the peptide biomarker. For example, for each set of candidate peptide biomarkers, a set of SAFE-SRM methods can be compiled. As demonstrated in Example 1, synthetic peptides of each candidate biomarker can be subjected to basic pH reversed-phase liquid chromatography (bRPLC) and generate fraction groups. The fraction groups of synthetic peptides can be subjected to mass spectrometry to determine which synthetic peptides are located in which groups, and at the same time determine, within its group, the standard intensity of the peptide (as derived from the certain amount initially used) (see, e.g., FIG. 5). A peptide biomarker can be validated, for example, when the peptide biomarker is detected and quantitated at an elevated level in a disease sample relative to a reference sample using a SAFE-SRM method described herein.

[0045] In some cases, methods for validating a peptide biomarker (e.g., using SAFE-SRM) can include subjecting one or more peptide biomarkers to bRPLC (e.g., bRPLC at high pH) to obtain a plurality of fractions (e.g., 5, 10, 15, 20, 25, 30, 35, 40, 45, 50, 55, 60, 65, 70, 75, 80, 85, 90, 95, 100, 110, 120, 130, 140, 150, 160, 170, 180, 190, 200 or more fractions); organizing the plurality of fractions into a plurality of fraction groups (e.g., 2, 3, 5, 10, 15, 20, 25, 30, 35, 40, 45, 50 or more fraction groups); separating the peptide biomarkers in each fraction group by orthogonal HPLC at acidic pH (low pH) to obtain continuous HPLC elutes; and analyzing the continuous HPLC elutes using a SRM method, wherein the peptide biomarker is validated when a collision energy, a dwell time optimized for the peptide biomarker is observed. In some cases, the SRM method can be pre-established with the synthetic peptides eluted in that fraction group. In some cases, the plurality of fractions includes 48, 96, or 384 fractions. In some cases, the plurality of fraction groups includes 16, 32, or 124 fraction groups.

[0046] In some cases, methods for validating a peptide biomarker (e.g., using SAFE-SRM) can include coupling the HPLC to a mass spectrometer. Any appropriate mass spectrometer can be used. Examples of mass spectrometers include, without limitation, an Orbitrap mass spectrometer, a triple quadrupole mass spectrometer, TOF, MALDI-TOF, and SELDI-TOF. For example, the HPLC can be coupled to a triple quadrupole mass spectrometer can be used when validating one or more peptide biomarkers as described herein.

[0047] In some cases, methods for validating a peptide biomarker (e.g., using SAFE-SRM) can include building transition parameters for each peptide biomarker. For example, a transition can include, without limitation, parameters of precursor ion m/Z, product ion m/Z, collision energy, and/or dwell time. A transition can be optimized for a specific precursor-product ion pair. For example, each peptide that is a precursor can have multiple product ions after being fragmented, and each product ion can have its own optimized collision energy and dwell time. In some cases, optimizing the dwell time can include re-assembling the transitions according to their hydrophobicity at high pH (see, e.g., Example 1 and FIG. 5). In some cases, when optimizing the dwell time, different target peptides can be spiked at about the same amount, to determine which peptides may need to be detected with a longer dwell time. Each peptide can have several transitions where each transition corresponds to a precursor-product ion pair. In some cases, transitions can be optimized for each target peptide using a synthetic peptide. In some cases, transition parameters can be as set forth in Dataset S5.

[0048] In some cases, fractions before and after any given fraction can be analyzed to balance out the potential fluctuation of the bRPLC retention time in analyzing numerous samples.

[0049] In some cases, methods for validating a peptide biomarker (e.g., using SAFE-SRM) can be established with synthetic peptides.

[0050] In some cases, methods for validating a peptide biomarker (e.g., using SAFE-SRM) can be established with light peptides (e.g., peptides that are not labeled with a heavy isotope). Use of light peptides can be advantageous for any of a variety of reasons. For example, light peptides are generally less costly to produce, and their use thus reduces the high cost of using heavy peptides, particularly in the early stages of biomarker development where hundreds or thousands of biomarkers need to be validated. Heavy-isotope-labeled peptides may also lead to ion suppression, thereby compromising sensitivity.

[0051] The methods and materials described herein can be used for both identifying a peptide biomarker (e.g., a circulating peptide biomarker) and validating a peptide biomarker (e.g., using SAFE-SRM).

[0052] The invention will be further described in the following examples, which do not limit the scope of the invention described in the claims.

### EXAMPLES

### Example 1: Selected Reaction Monitoring Approach for Validating Candidate Biomarkers

[0053] This example describes a peptide-centric platform for developing unique biomarkers that can narrow down a large list of candidate peptides to a more manageable list that does not compromise quantification, sensitivity, or specificity. This example further shows that peptides isolated directly from plasma, rather than from cancer tissues, can be used for the discovery of unique cancer biomarkers.

### Materials and Methods

[0054] Plasma Samples. Plasma samples from a total of 266 individuals were obtained, comprising 96 healthy individuals, 81 patients with ovarian cancer, 51 with pancreatic cancer, and 38 with colorectal cancer. The plasma samples and clinical data were obtained from The Ontario Tumor Bank, Indivumed, Innovative Research, and The Johns Hopkins Hospital after appropriate institutional review board approval. Selected clinical features of the 266 patients and histopathologic characteristics of their tumors are listed in Dataset S1.

[0055] Materials and Reagents. Human plasma depletion Seppro IgY14 LC10 column systems were purchased from Sigma-Aldrich. Tris-(2-carboxyethyl)phosphine (TCEP) and methyl methanethiosulfonate (MMTS) were purchased from Thermo Fisher Scientific. LysC and Trypsin proteases were purchased from Promega. PNGase F was purchased from New England Biolabs. Titansphere, 10 or 5 μm, for TiO2 enrichment was obtained from GL Sciences. CA19-9 and CA125 antibodies were purchased from Fujirebio Diagnostics. PolySULFOETHYL A column (100×2.1 mm, 5 μm, 200 Å) for strong cation exchange (SCX) chromatography was purchased from PolyLC. C18 Cartridges for sample preparation and chromatography columns for bRPLC and online HPLC of triple-quadrupole mass spectrometer were purchased from Waters. All iTRAQ reagents and buffers were purchased from AB Sciex. Synthetic peptides were purchased from Genscript. All other reagents were purchased from Sigma-Aldrich, unless otherwise indicated.

[0056] Preparation of Solutions. SCX solvent A contained 10 mM KH2PO4, 25% (vol/vol) acetonitrile; SCX solvent B contained 10 mM KH2PO4, 350 mM KCL, 25% (vol/vol) acetonitrile; and for both SCX solvents, pH 2.75 was achieved by adding 50% H3PO4. bRPLC solvent A contained 10 mM TEABC; bRPLC solvent B contained 10 mM TEABC, 90% (vol/vol) acetonitrile. SAFE-SRM MS solvent A was water with 0.1% (vol/vol) formic acid; SAFESRM solvent B was acetonitrile with 0.1% (vol/vol) formic acid.

[0057] Pooled Plasma Samples for iTRAQ Based Discovery Studies. Fifty normal individuals, 13 patients with pancreatic cancer, 18 with colorectal cancer, and 18 with ovarian cancer were chosen for initial analysis. One hundred microliters of plasma from each individual in one of these four groups of patients was pooled before processing through phase 1 of the study. Phase 1 of this study used these pools rather than peptides from individual patients and are referred to as “pooled peptides.”

[0058] Plasma Depletion. Abundant proteins [albumin, IgG, α1-antitrypsin, IgA, IgM, transferrin, haptoglobin, α2-macroglobulin, fibrinogen, complement C3, α1-acid glycoprotein (orosomucoid), HDL (apolipoproteins A-I and A-II), and LDL (mainly apolipoprotein B)] in the plasma were depleted using a Seppro IgY14 LC10 column system. Plasma samples were diluted 5x in IgY dilution buffer, filtered (0.22 μm), and then injected into IgY LC10 columns attached to an Agilent 1200 HPLC system consisting of a binary pump, external sample injector, UV detector, and a fraction collector. The nonretained fraction was collected.

[0059] Plasma Proteome Sample Preparation. The depleted plasma proteins were denatured in 9 M urea, reduced using 5 mM TCEP at 60° C. for 15 min, and cysteine residues were alkylated with 5 mM MMTS for 15 min at room temperature in dark. The alkylated protein solution was filtered to desalt using the Amicon Ultra-15 Centrifugal Filter Unit with Ultracel-10 membrane (Millipore) and washed with 9Murea for two times, and the desalted plasma protein was reconstituted with 4 mL of 40 mM TEABC. The samples were then digested for 3 h with LysC protease followed by an overnight digestion using sequencing-grade trypsin at 37° C. Additional sequencing-grade trypsin was added 3 h before digestion ended, and the digestion system was incubated at 50° C. for the last 30 min before adding 1% TFA to stop the reaction. C18-mediated cleaning of the digest was performed as described elsewhere (see, e.g., Howlader et al. 2014 SEER Cancer Statistics Review,1975-2011 (National Cancer Institute, Bethesda)). For samples not used in iTRAQ experiments, that is, those from individual donors rather than pooled plasma samples, 50 mM iodoacetamide (Sigma-Aldrich) rather than MMTS was used for alkylation.

[0060] N-Glycosylated Protein Enrichment and Isolation from Human Plasma Samples. One hundred microliters of pooled human plasma samples was denatured in 9 M urea and processed through reduction, alkylation, and filtration to remove salt, and then subjected to lyophilization. Lyophilized proteins were reconstituted with 5% acetonitrile with 0.1% TFA. The 10 mM sodium periodate was applied to the protein solution followed by incubation at 4° C. for 1 h in the dark. Another C8 cartridge cleaning was performed to purify the oxidized proteins. Lyophilized proteins were reconstituted with 1 mL of hydrazide resin coupling buffer (0.1 M sodium phosphate buffer, pH 7.0), and 250 μL of hydrazide resin, purchased from Bio-Rad, was added to the solution to conjugate the glycoproteome by incubation at room temperature for 5 h. The resin was then washed twice with 4 mL of 1.5 M NaCl followed by 4 mL of water, twice with 4 mL of 100 mM TEABC buffer, and finally with 4 mL of 50 mM sodium phosphate (pH 7.5). Twenty-five microliters of PNGase F was added to the resin followed by incubation at 37° C. for 4 h with agitation. The resin was then centrifuged at 8,000× g for 5 min, and the supernatant was collected. The resin pellet was washed twice with 500 μL of 40 mM ammonium bicarbonate and subjected to centrifugation as above. The supernatants from these centrifugations were combined, lyophilized, and reconstituted with 40 mM ammonium bicarbonate, and subject to trypsin digestion and C18 cleaning, after which they were used for iTRAQ labeling. A total of 657 glycosylated proteins was identified and quantified (Dataset S3). There were 29 proteins identified from the N-glycosylated protein enrichment experiments that were carried forward to the validation phases of this study.

[0061] iTRAQ Labeling, SCX Cleaning, and bRPLC Fractionation. Peptides from the four pools were reconstituted in 15 μL of H2O and 20 μL of dissolution buffer (provided with the iTRAQ labeling kit) and incubated with one of the four iTRAQ reagents diluted in 70 μL of ethanol at room temperature. The peptides from each of the four pools were labeled with iTRAQ reagents containing 114, 115, 116, or 117 reporter ions, respectively. After incubation at room temperature for 2 h, 50 μL of water was added. After another incubation for 10 min at room temperature, 100 μL of water was added. After incubation at room temperature for another 10 min, 40 μL of 40 mM ammonium bicarbonate was then added, and the reactions were incubated at 4° C. overnight. The samples were vacuum dried to 50 μL, combined, and diluted to 4 mL in 10 mM potassium phosphate buffer (pH 2.7) containing 25% acetonitrile (SCX solvent A). The pH of the sample was adjusted to 2.7 using 100 mM phosphoric acid. iTRAQ-labeled peptides were then purified using SCX chromatography with a polysulfoethyl A column (PolyLC) (300 Å, 5 μm, 100×2.1 mm) (see, e.g., Fishman et al. 2005 Am J Obstet Gynecol 192:1214-1221) on an Agilent 1200 HPLC system. Fractionation was carried out for a period of 45 min using a linear gradient of increasing salt concentration from 0 to 350 mM KCl in SCX solvent B. Peptide fractionations were then vacuum dried and reconstituted with 4 mL of bRPLC solvent A and subject to bRPLC fractionation with an XBridge C18 column (Waters). A total of 96 fractions from the bRPLC was deposited in a 96-well plate.

[0062] Plasma Peptide Preparation. The 200-μL plasma samples from each individual were processed using the procedures described above. Lyophilized plasma peptide samples were reconstituted in 2 mL of 10 mM triethylammonium bicarbonate (pH 8.2) with 3% acetonitrile. Peptide fractionation was performed on an Agilent 1260 HPLC system with a C18 column at high pH. The two HPLC mobile phase solvents were 10 mM triethylammonium bicarbonate (solvent A), and 10 mM triethylammonium bicarbonate with 90% acetonitrile (solvent B). A 120-min HPLC gradient method was applied with a flushing step for the first 20 min to remove salt, and this was followed by a 96-min gradient with solvent B increasing from 0 to 100%. The 96 fractions from a plasma peptide sample were collected in a Protein LoBind plate (Eppendorf), and the peptides eluted during each 1-min window were collected in each well. Peptide fractions were combined according to the scheme shown in FIG. 5A and vacuum dried. Dried peptides were then reconstituted using 40 μL of SRMsolvent A and spiked with 3 fmol of heavy isotope-labeled K-Ras wild-type (WT) peptides (LVVVGAGGVGK*; SEQ ID NO:23) before another online fractionation on an Agilent 1290 UHPLC system. The online UHPLC fractionated each sample at low pH (pH 3), which created a dramatically different fractionation profile than the first HPLC fraction, which was performed at high pH (pH 8.2). Fractionated samples were continuously injected into the Jet Stream ESI source of an Agilent 6490 triple-quadrupole mass spectrometer operated in SRM positive-ion mode.

[0063] Quantitative Proteomics Assays for Normal and Cancer Plasma Samples. iTRAQ labeling-dependent quantitative proteomics assays were performed to evaluate the proteomic difference between normal plasma and cancer plasma samples. The pipeline included plasma depletion, denaturation, reduction, alkylation, enrichment for glycoproteins, trypsin digestion, desalting, iTRAQ labeling, strong cation exchange (SCX) cleaning, and bRPLC fractionation followed by Orbitrap MS analysis and quantitative proteomics data analysis using in-house-developed R scripts.

[0064] Liquid Chromatography-MS/MS and Plasma Quantitative Proteomics Data Analysis. Nanoflow electrospray ionization liquid chromatography (LC)-MS/MS analysis of the iTRAQ-labeled bRPLC-separated samples was performed with an LTQ Orbitrap Velos (Thermo Fisher Scientific) mass spectrometer interfaced with reversed-phase system controlled by Eksigent nano-LC and Agilent 1100 microwell plate autosampler. The bRPLC fractions were sequentially processed through a 75 μm×2 cm, Magic C18AQ column (5 μm 100 Å; Michrom Bioresources) and then separated on an analytical column (75 μm×10 cm, Magic C18AQ, 5 μm, 100 Å; Michrom Bioresources) with a nanoflow solvent delivery. The mobile phase flow rate was 200 nL/min, composed of 3% acetonitrile/0.1% formic acid (solvent A) and 90% acetonitrile/0.1% formic acid (solvent B), and the 110-min LC-MS/MS method consisted of a 10-min column equilibration procedure, 10-min sample-loading procedure, and the following gradient profile: (min:B%) 0:0; 2:6; 72:40%; 78:90%; 84:90%; 87:50%; 90:50% (last three steps at 500 nL/min flow rate). The MS and MS/MS data were acquired in positive-ion mode at a spray voltage of 2.5 kV and at a resolution of 60,000 at m/z 400. For every duty cycle, the 10 most abundant peptide precursors were selected for MS/MS analysis in the LTQ Orbitrap Velos (normalized collision energy, 40%). A detailed flowchart of iTRAQ-based quantitative proteomics is shown (FIG. 4A).

[0065] Quantitative Proteomics Analysis. The MS data from the iTRAQ experiments were analyzed with Proteome Discoverer (version 2.1; Thermo-Fisher). MS/MS spectral data were processed using the extract feature under the MASCOT and Sequest HT search components of the program. For both components, the same search parameters were selected, and these included iTRAQ labels at tyrosine, oxidations of methionine, and deamidation at N/Q as variable modifications. iTRAQ labels at N terminus, and lysine, methylthio label at cysteine were used as fixed modifications. The MS data were searched against NCBI RefSeq 72 human protein database containing 55,692 sequences. Proteome Discoverer calculates the percentage of false identifications using a separate decoy database (reverse database) that contains the reversed sequences of the protein entries. The Proteome Discoverer counts the number of matches from both searches and calculates the false-discovery rate (FDR) by counting only the top match per spectrum, assuming that only one peptide can be the correct match. The score thresholds were adjusted to obtain 1% and 5% reverse hits compared with forward hits, resulting in an overall FDR of 5%. Precursor and reporter ion window tolerance were fixed at 20 ppm and 0.05 Da, respectively. The criteria specified for generation of peak lists included signal-to-noise ratios of 1.5 and inclusions of precursor mass ranges of 600-8,000 Da. The two validated SAFE-SRM target peptides from PPIA protein were initially identified unambiguously using a 1% FDR cutoff, as shown in FIG. 8.

[0066] Selection of 641 Peptides as Potential Cancer Biomarkers for Further Validation. A total of 204 proteins was shared by at least two out of three whole-plasma iTRAQ proteomics datasets. Eighty-seven of these proteins were selected as potential cancer biomarkers for further SRM-based validation based on their abundance test score in the empirical modified eBayes t test. A total of 461 proteotypic peptides from these proteins was selected as SRM quantifying targets (approximately five target peptides per protein). Of these 461 peptides, 208 were directly observed in our experiments and an additional 253 peptides were added from querying several databases, including PeptideAtlas, PRIDE, etc. (see, e.g., Desiere et al. 2006 Nucleic Acids Res 34:D655-D658; Wang et al. 2011 Proc Natl Acad Sci USA 108:2444-2449; and Vizcaino et al. 2016 Nucleic Acids Res 44:D447-D456). We also identified 180 peptides in our iTRAQ datasets that did not meet our rigorous criteria for initial selection but which we considered reasonable candidate biomarkers on the basis of their biologic properties. Altogether, we selected 641 SRM target peptides from phase 1 of our study that were carried forward to the validation phase (Dataset S4).

[0067] Statistical Analysis of Peptide Quantification Using the limma Package in R/Bioconductor. Peptide expression ratios of the pooled samples were calculated based on the median value of peptide ion intensities of iTRAQ labeling 117 (pancreatic cancer pool), 116 (colorectal cancer pool), or 115 (ovarian cancer pool) relative to that of 114 (normal individual pool). Sample preparation was performed in duplicate (two biological replicates). MS analysis was performed once on the first replicate (generating dataset 1) and twice on the second replicate, generating datasets 2 and 3, which were therefore technical replicates. A matrix was generated to store the raw peptide abundance data, where row names contained all unique sequences of the peptides. Columns 1 through 4 stored the intensities of 114,115, 116, and 117 labeling intensities from dataset 1. Columns 5 through 8 and columns 9 through 12 stored the analogous labeling intensities from datasets 2 and 3, respectively. “NA” was used to indicate that a peptide was not detected in a particular dataset with a particular label (Dataset S2).

[0068] MA plots were generated to compare the potential bias between different datasets. Because no significant bias was observed in these MA plots (FIG. 9), median normalization was chosen for subsequent analysis (FIG. 10). For this analysis, we borrowed the concepts developed for the analysis of microarray data and used R packages from the Bioconductor project to analyze peptide fold changes (see, e.g., Li et al. 2009 Expert Rev Mol Diagn 9:555-566). In particular, we used the modified t test from limma (linear models for microarray data) to judge the statistical significance of the changes observed (see, e.g., Li et al. 2009 Expert Rev Mol Diagn 9:555-566).

[0069] Let yi and xi denote the abundances of the ith protein in cancer plasma proteome and normal plasma proteome, respectively, so that

$${y}_{i} ∼ Norm ( μ \text{?} , σ \text{?} )$$

$$and$$

$${x}_{i} ∼ Norm ( μ \text{?} , σ \text{?} )$$

$$\text{?} \text{indicates text missing or illegible when filed}$$

where μ and σ denote the mean and variance of a peptide abundance in the three datasets. To avoid identifying peptide biomarkers (highly up-regulated in cancer plasma proteome compared with normal) that have significant variance between replicates, we adopted a t test where

$$t - statistic = \frac{\overline{y} - \overline{x}}{\sqrt{\frac{\text{?} + \text{?}}{n}}}$$

$$\text{?} \text{indicates text missing or illegible when filed}$$

The t test was modified by an empirical Bayes method. Instead of testing each peptide in isolation from all others, the empirical Bayes modified t test borrows strength from all other peptides, thus improving the error estimate of each individual peptide. The eBayes modified t test from limma R package was used to perform statistical analysis for the difference of peptide abundances between samples. In total, 208 peptides from 87 different proteins were identified as candidate cancer biomarkers and were carried on to the validation phase of this study.

[0070] Candidate Biomarkers Identified by Quantitative Plasma Proteomics. Proteomics database searches (using PRIDE, www.ebi.ac.uk/pride/archive/, and Peptide Atlas, www.peptideatlas.org/) were conducted for the 87 proteins, and their 253 most readily detectable peptides (other than the 208 noted above) were added to the candidate peptide list. Another 180 peptides observed repeatedly from the three discovery datasets but that did not pass the eBayes modified t test were also added. In total, 641 candidate peptides were subject to further validation (Dataset S4).

[0071] Development of SAFE-SRM Assays. A total of 4,384 transitions targeting the 641 target peptides in our study was optimized by using synthetic peptides. For each synthetic peptide, a set of optimized collision energies and dwell times according was obtained (Dataset S5).

[0072] Briefly, an HPLC fractionation was performed to separate the 641 synthetic peptides into 96 fractions based on each peptide's hydrophobicity in a weak basic environment (pH 8.2). A total of 96 peptide fractions was then organized into 32 groups comprising three sequential fractions each, according to the scheme shown in FIG. 5. Each of these groups was subjected to fractionation through a C18-based HPLC coupled to the Agilent 6490 triple-quadrupole mass spectrometer. SRM assays covering all 4,384 transitions were performed in each of the groups to determine the optimum parameters for detecting each peptide. After identifying the SAFE-SRM fraction group ID for each peptide, a unique SAFE-SRM method was constructed for each fraction group, and the SRM transitions in sequential groups that eluted just before or just after the target group were also incorporated into the method (FIG. 5). The SAFE-SRM group ID for each peptide is listed in Dataset S5, where each ID refers to the bRPLC fractionation plate shown on FIG. 5.

[0073] The 641 candidate peptides were synthesized and used as standards to establish the SAFE-SRM method using a three-step optimization approach:
[0074] i) Optimization of collision energy was performed for each pair of precursor ion (usually positively charged proteotypic peptide) and product ion (peptide fragments generated from collision-induced dissociation). For each precursor ion, two steps above and two steps below (step size, 4 eV) the theoretical optimum value of collision energies were applied to fragment each precursor ion. For each peptide, five to eight fragmented ions showing the strongest intensities were selected as the detection targets. Mass-to-charge ratio (m/z) of the peptide, optimized collision energy values, and the m/z of the peptide fragmented ions were thus established for each peptide. A set of such values is typically termed as an SRM transition. In total, 4,384 SRM transitions were optimized in this way to target the 641 peptides (on average, approximately seven transitions per peptide).
[0075] ii) Optimization of bRPLC fractionation. The 641 synthetic peptides were spiked into the peptides derived from the pooled normal plasma sample used in phase 1 of the study prepared as described above, and three independent HPLC fractionations were carried out. As noted above, the 96 fractions from the bRPLC fractionation were combined into “fraction groups,” with each group containing three sequential fractions. The 4,384 transitions were assessed in each bRPLC fraction group, with fixed dwell time for each transition (5 ms). The bRPLC fraction group containing the highest amount of each peptide was determined, thereby defining a fraction group ID for each peptide. The standard intensity (SI) (the intensity measured by mass spectrometer for 10 fmol of the peptide) for each peptide was also recorded.
[0076] iii) SRM method assembly. A unique SRM method was created for each fraction group by compiling all of the transitions from the peptides with the same fraction group ID. The same SRM transitions were evaluated in the fraction groups eluting before and after the main fraction group. Thus, each fraction group was assessed with three different sets of SRM transitions. The dwell time for each transition was modified to be inversely proportional to the SI of the peptide, ranging from 3 to 20 ms.

[0077] For each synthetic peptide, a set of optimized collision energies and dwell times according was obtained. A list of the SRM transitions and fraction group IDs for all of the peptides are shown in Dataset S5. All transition parameters were manually examined and curated to exclude ions with excessive noise due to coelution with nonspecific analytes in human plasma samples. A set of 1,990 transitions was reproducibly detectable in a pool of all advanced cancer plasma samples used in phase 1, corresponding to 318 peptides (Dataset S5).

[0078] After initial method-building steps using standard peptides, we were able to pare the number of groups that needed to be analyzed in the final HPLC-MS step from 32 to 20. A total of 318 of the 641 peptides was reproducibly observed in at least one of these 20 groups, yielding 1,990 detectable transitions (average of 6.3 transitions per peptide).

[0079] Performance Evaluation of SAFE-SRM. Six heavy-isotope-labeled peptides (peptide 1: IQLVEEELDR* (SEQ ID NO:3); peptide 2: VILHLK* (SEQ ID NO:4); peptide 3: IILLFDAHK* (SEQ ID NO:5); peptide 4: TLAESALQLLYTAK* (SEQ ID NO:6); peptide 5: LLGHLVK* (SEQ ID NO:7); peptide 6: GLVGEIIK* (SEQ ID NO:8), where * indicates C13 and N15 heavy-isotope-labeled amino acids) were mixed at 1 fmol each, and the mixture was analyzed by a standard SRM method. Equal amounts (1 fmol each) of the six heavy-isotope-labeled peptides were spiked into proteolytically digested plasma peptide sample, followed by detection through a standard SRM approach (without bRPLC fractionation), a bRPLC-SRM approach, or a SAFE-SRM approach. The peptide abundance was calculated by the AUC of the peptide's SRM signal detected in each approach.

[0080] Agilent 6490 Mass Spectrometer Tuning. SAFE-SRM assays for each plasma sample were conducted only after confirmation of the instrument's performance with the manufacturer's tuning mixes (Autotune and Checktune) as well as a tuning mixture we prepared. Our tuning mixture was composed of 20 peptides representing a wide range of mass (M/z range, 200-1,400) and hydrophobicity (Table S2).

TABLE S2
Standard Peptides in Tuning Mixture (10 femto mole each).

| | SAFE-SRM | |
|---|---|---|
| Peptide Sequence | fraction group ID | SEQ ID NO: |
| DEIESVK | 3 | 9 |
| VGSAKPGLQK | 4 | 10 |
| ETIVLK | 5 | 11 |
| IQLVEEELDR | 6 | 3 |
| SIVNYKPK | 7 | 12 |
| DLQFVEVTDVK | 7 | 13 |
| TLLGDGPVVTDPK | 8 | 14 |
| GLVGEIIK | 9 | 8 |
| HFTILDAPGHK | 10 | 15 |
| LVDKFLEDVK | 11 | 16 |
| KIPVVFR | 11 | 17 |
| VILHLK | 12 | 4 |
| FPVIQHFK | 12 | 18 |
| LLGHLVK | 13 | 7 |
| FFLSHPAYR | 14 | 19 |
| LFAGLVHVK | 14 | 20 |
| TLAESALQLLYTAK | 15 | 6 |
| IILLFDAHK | 15 | 5 |
| VLDFEHFLPMLQTVAK | 17 | 21 |
| LLGNVLVCVLAHHFGK | 18 | 22 |

[0081] Data Analysis. A set of assays composed of 20 different SRM methods for all groups were performed to quantify the abundance of each of the 318 peptides. Twenty datasets were generated by the mass spectrometer using the 20 SAFE-SRM methods for each plasma sample and were imported into Skyline 3.6 for data analysis (see, e.g., MacLean et al. 2010 Bioinformatics 26:966-968). We improved the labeled reference peptide (LRP) method (see, e.g., Zhang et al. 2011 Mol Cell Proteomics 10:M110.006593) through a dual-control approach to adjust for the variance of sample preparation efficiency and fluctuations of mass spectrometer sensitivity. The first control was a heavy-isotope-labeled mutant KRAS protein spiked into the plasma sample before sample preparation. The second control was a heavy-isotope-labeled WT KRAS peptide spiked into each group before running on the final HPLC-MS. The abundance of a target peptide was represented by the total area under the curve (AUC) of all its transitions normalized to the total AUC of all transitions from the 3-fmol heavy-isotope (heavy-lysine residue)-labeled K-Ras WT peptides (LVVVGAGGVGK; SEQ ID NO:23). Variations in sample preparation were adjusted by normalizing the abundance of each peptide from a given sample to the abundance of the peptides derived from the heavyisotope-labeled K-Ras mutant (G12D) protein purchased from Origene. We selected six peptides derived from this heavy-isotope amino acid (heavy-lysine and heavy-arginine)-labeled protein for this adjustment. Peptide sequences and optimized transition parameters are listed in Dataset S5.

[0082] A SAFE-SRM abundance score (S) was calculated for each of the 318 peptides in every sample. Assume that Pi,j,k is the integrated intensity of a peptide i in sample j fraction k, Nj,k is the integrated intensity of the K-Ras WT heavy control peptide in sample j, fraction k, and Mj is the integrated intensity of the median abundance K-RAS protein peptide in sample j. Let Si,j be the abundance score of peptide i in sample j; therefore, Si,j can be calculated as follows:

$${S}_{i , j} = \frac{{P}_{i , j , k}}{{N}_{j , k} * {M}_{j}} ,$$

where for Mj:

$${M}_{j} = median ( \frac{{P}_{1 , j , k}}{{N}_{j , k}} , \frac{{P}_{2 , j , k}}{{N}_{j , k}} , … , \frac{P {\text{?}}_{j , k}}{{N}_{j , k}} ) . \\ \text{?} \text{indicates text missing or illegible when filed}$$

In this study, 71 out of 318 peptides were repeatedly detected across two adjacent SAFE-SRM groups. The abundance of such peptides in each sample was calculated by summing the normalized abundance scores in adjacent SAFE-SRM runs where the peptides were detected.

[0083] Reproducibility of the SAFE-SRM pipeline was measured by calculating the reproducibility ratio (RR) for sample j as follows:

$${RR}_{j} = median ( \frac{{N}_{j , k}}{{M}_{j}} ) .$$

RR value for each sample processed through SAFE-SRM pipeline was listed in Dataset S7.

[0084] Cancer Proteomic Biomarker Identification. To identify the best peptide classifiers, stepwise forward selection logistic regression was employed in MATLAB. First, a logistic regression model was fit to the training set of 50 samples, including 27 known healthy samples and 7, 7, and 9 known colorectal, ovarian, and pancreatic cancer plasma samples using the 318 peptide abundance scores. Leave-one-out cross-validation was used to estimate predictive performance of each model. The peptide yielding the lowest cross-validated misclassification rate on the training set was selected for inclusion in the model. If more than one peptide achieved the lowest misclassification rate, ties were broken by selecting the peptide that produced the greatest model likelihood. This process of selecting a peptide biomarker to be added to the model was repeated until no further decrease in cross-validated misclassification rate could be achieved by addition of a peptide. To find a subset of peptides from the same protein that could achieve perfect classification, the same stepwise forward selection procedure was applied for each potential biomarker protein. After identifying the best classifiers, predictive performance of models fit to different combinations of the peptide biomarkers was compared on an additional 48 samples in a blind manner. The predictive models constructed by combinations of best peptide classifiers and by each individual best peptide classifier were evaluated on an additional cohort of 73 samples in a blind manner.

### Results

[0085] Study Design. This study was designed to identify and validate unique proteomic biomarkers for cancers using a combination of qualitative and quantitative MS techniques. Most previous studies in this area have begun with the analysis of cancer tissues, and then attempted to determine whether cancer-specific proteins or peptides could be identified in the plasma. In the current study, we attempted to identify candidate peptides directly from the plasma. The study was executed in three discrete phases: phase 1, global plasma proteomic profiling of samples from cancer patients and healthy individuals, yielding 641 candidate peptide markers from 188 genes; phase 2, implementation of a selected reaction monitoring (SRM)-based assay, called sequential analysis of fractionated eluates by SRM (SAFE-SRM), to evaluate each of the 641 candidate peptide markers in additional plasma samples, yielding two peptides from peptidyl-prolyl cis-trans isomerase A (PPIA) as promising biomarkers; and phase 3, evaluation of the performance of these two peptides in an independent set of cancer patients and controls using SAFE-SRM. Phase 1 was performed on an Orbitrap mass spectrometer, which is most suitable for qualitative analysis of large numbers of proteins, while phases 2 and 3 were conducted on a triple-quadrupole mass spectrometer, most suitable for quantitative analyses of selected analytes. A total of 266 plasma samples from different donor sources was evaluated during the three phases of this study (Table S1).

TABLE S1
Study design and cases involved in the study.

| | | Normal | Pan- | Colo- | | |
|---|---|---|---|---|---|---|
| Study | | Healthy | creatic | rectal | Ovarian | |
| Phases | Study aims | Individual | Cancer | Cancer | Cancer | Total |
| Phase 1 | Identification | 50 | 13 | 18 | 18 | 99 |
| | of candidate | | | | | |
| | biomarkers | | | | | |
| | from cancer | | | | | |
| | patients | | | | | |
| Phase 2 | Development | 32 | 14 | 20 | 28 | 94 |
| | of SAFE-SRM | | | | | |
| | and Testing | | | | | |
| | of candidate | | | | | |
| | peptides by | | | | | |
| | SAFE-SRM | | | | | |
| Phase 3 | Validation by | 14 | 24 | 0 | 35 | 73 |
| | SAFE-SRM | | | | | |

[0086] Phase 1: Identification of Candidate Biomarkers from Cancer Patients. To identify potential protein biomarkers for cancers, we first created four pooled human plasma samples composed of equal volumes of plasma from 50 normal healthy individuals, 18 patients with ovarian cancer, 13 patients with pancreatic cancer, and 18 patients with colorectal cancer (Dataset S1). All patients with cancer had advanced disease so as to maximize the likelihood that high concentrations of putative biomarkers would be found in the plasma. An antibody-based plasma depletion was performed to remove 14 highly abundant proteins, such as albumin and immunoglobulins, from each of the four pools. Each pool was then digested with trypsin and the resultant peptides were differentially labeled with iTRAQ. iTRAQ labeling allows the four pools to be mixed and analyzed in a single MS experiment. The pools were then analyzed to assess whole proteomes (FIG. 1A and FIG. 4A). In a separate experiment, the pooled plasma samples were enriched for glycoproteins before trypsin digestion and iTRAQ labeling to reveal potential differences in the peptides derived from glycosylated proteins (FIG. 4B).

[0087] We performed replicates of the entire workflow outlined in FIG. 4. In total, 223,602 peptides were identified through these analyses, representing 10,789 unique peptides from 1,249 unique proteins (Datasets S2 and S3). The relative abundances of each of these peptides in the plasma samples from cancer patients and normal individuals was then calculated using an empirical-Bayes modified t test (Materials and Methods). A total of 8,069 unique peptides was quantified in at least two replicates, and the correlation for the abundances of these peptides between the replicates was 0.74 (95% CI, 0.73-0.75). As described in detail in Materials and Methods, our analyses eventually yielded 641 peptides derived from 188 proteins with significantly increased abundance in the pooled cancer plasma samples compared with the pooled normal controls (Dataset S4).

[0088] Phase 2a: Development of SAFE-SRM. The validation of hundreds of unique potential peptide biomarkers is a daunting task. This difficulty is exacerbated by the fact that the abundances of such peptides from plasma proteins are generally low and the abundances of different peptides vary considerably within this low range. We developed an approach to tackle these challenges, with five major components. First, the 641 peptides of interest were individually synthesized, but not highly purified, so as to keep costs manageable. Second, an SRM method was created for each of these peptides. Each of the 641 methods was optimized for the collision energies and dwell times of the precursor ions that yielded the highest intensities of the post-collision peptide-specific transitions of major interest. The dwell time given to each peptide was inversely proportional to the peptide's intensity measured from a human plasma peptide sample spiked with equal amounts of synthetic peptides. This feature permitted the instrument to spend more time on detecting the peptides with lower signal intensities, thereby improving the overall ion statistics for the detection of low-abundance peptides. This protocol led to the identification of 4,384 transitions (approximately seven transitions per peptide; Dataset S5).

[0089] Third, the peptides were fractionated using basic pH reversed-phase liquid chromatography (bRPLC), yielding 96 fractions organized into 32 “fraction groups” each containing three sequential fractions; 20 fraction groups were selected for further analysis. Fourth, the peptides in each fraction group were separated by an orthogonal high-performance liquid chromatography (HPLC) method based on hydrophobic interactions (C18-RPLC). Finally, continuous elutes from the second HPLC column were analyzed using an SRM method composed of the collision energies, dwell times, and transitions that had been preoptimized using the synthetic peptides noted above. We termed this approach SAFE-SRM (FIG. 5). One advantage of SAFE-SRM is that it employs a two-dimensional chromatographic fractionation. The individual fractions contain much less peptide than the total, thereby reducing ion suppression from unwanted peptides and increasing the signal-to-noise ratio. A second advantage of SAFE-SRM is that it converts the qualitative approach used for peptide discovery to a quantitative approach during the validation phases. Finally, the method is highly tolerant to fluctuations in elution times that are commonly observed in bRPLC chromatography because sequential fractions are redundantly tested for peptide abundance (Materials and Methods).

[0090] To assess the performance of SAFE-SRM, we chose six peptides with different hydrophobicity characteristics in HPLC and synthesized them as heavy isotope-labeled forms (Materials and Methods). We then mixed these peptides and performed a standard SRM analysis using the optimized collision energies and dwell times described above. All six peptides were detected at high confidence, as expected. However, when we spiked these peptides into trypsin-digested samples generated from normal plasma as described above, their average intensities were only around 5% of that obtained with the pure peptides, and only three of the six peptides were detectable at all. When this spiked sample was analyzed with SAFE-SRM, all six peptides could be detected, with an intensity that averaged 70% of that obtained with the pure peptides (FIG. 2).

[0091] Phase 2b: Testing of Candidate Peptides by SAFE-SM. We began by using SAFE-SRM to evaluate the four plasma pools used for the initial iTRAQ-based discovery phase of the study. We expected that the peptides detectable in these pooled samples would be those least likely to be affected by ion suppression, the coelution of unwanted peptides in the same chromatographic fractions, or other technical issues. After careful examination, 318 out of the 641 tested peptides proved to be reproducibly detectable in the pooled samples through 1,990 transitions (6.3 transitions per peptide; Dataset S5). These 318 peptides mapped to 121 proteins.

[0092] We then used SAFE-SRM to evaluate 94 individual plasma samples, none of which was used in the discovery phase. Forty-eight of these samples were from normal individuals and 14, 14, and 18 were from patients with colorectal cancers, ovarian cancers, and pancreatic cancers, respectively (Dataset S1). SAFE-SRM abundance scores were calculated for each of the 318 peptides in each of the 94 individual and 4 pooled plasma samples (Dataset S6). We used statistical methods to determine whether any peptide or combination of peptides was able to accurately classify the origin of a sample from the peptide signatures. For this purpose, we randomly selected approximately one-half of the samples for training (27 from healthy donors and 7, 7, and 9 samples from patients with colorectal cancers, ovarian cancers, or pancreatic cancers, respectively). The remaining half of the samples were used to test the performance of the classifiers derived from the training samples.

[0093] A recursive, leave-one-out cross-validation strategy was used to estimate the predictive performance of the classification model as it evolved. The peptides yielding the highest cross-validated classification scores on the training set were first selected. Data on the peptides were then searched to determine whether any second peptide could increase the classification score. This process of selecting a peptide biomarker to be added was repeated until no further increases in the classification score could be achieved by addition of other peptides. Using this approach, several combinations of peptides with excellent classification potential were identified (FIG. 3A and B).

[0094] The best performance was observed for the classification of ovarian cancers with a combination of several markers. The top single peptide marker for ovarian cancers was VSFELFADK (SEQ ID NO:1) from PPIA (also known as Cyclophilin-A). We then determined whether any of the other peptides from PPIA among those in the 318-peptide set could be added to the classifier without decreasing specificity and found that a second peptide from PP1A (FEDENFILK; SEQ ID NO:2) could be added in this way (FIG. 3C). Using peptide abundance levels resulting in 100% specificity among 36 normal samples, we found that VSFELFADK (SEQ ID NO:1) and FEDENFILK (SEQ ID NO:2) yielded 75.0% and 78.6% sensitivities, respectively. The Pearson correlation coefficient for the two PPIA peptides was 0.83 (95% CI, 0.78-0.87). At least one of the two peptides was elevated in 23 (82.1%) of the 28 samples.

[0095] Phase 3: Validation. The dataset used to form the classifier was large: 1,990 transitions from 318 peptides tested in each of 98 samples. It is well known that overfitting is possible in such experiments and that independent validations of any classifier are mandatory. We therefore evaluated a separate cohort of 73 cases, consisting of plasma from 35 ovarian cancer cases and 38 samples from healthy individuals or patients with other cancer types (Dataset S7). In these 73 cases, SAFE-SRM was performed, but the only transitions analyzed were those corresponding to the two peptides from PPIA plus a peptide from Fibronectin, which we found to be expressed at similar levels in all samples and was thereby used for normalization. The relative abundances required for a positive score were predetermined from the results in phase 2b described above. Examples of the SAFE-SRM profiles for these peptides in ovarian cancer patients and normal individuals are shown in FIG. 6. Twenty (57.1%; 95% CI, 40-73%) of the 35 plasma samples from ovarian cancer cases scored positive for VSFELFADK (SEQ ID NO:1) from PPIA, while none of the 14 samples from normal individuals scored positive (specificity of 100%; 95% CI, 89-100%). For the second peptide FEDENFILK (SEQ ID NO:2) from PPIA, 14 (40.0%; 95% CI, 24-58%) of the 35 plasma samples from ovarian cancer cases were scored as positive, and, as for the first PPIA peptide, none of the 14 samples from healthy individuals scored positive. All of the plasma samples scoring positive for the FEDENFILK (SEQ ID NO:2) peptide also scored positive for the VSFELFADK (SEQ ID NO:1) from the same protein. Twenty-four patients with pancreatic cancer were tested in this assay, and only one of them (4.2%; 95% CI, 0.2-23.1%) scored positive for peptide VSFELFADK (SEQ ID NO:1), and none for peptide FEDENFILK (SEQ ID NO:2) (Dataset S7).

[0096] It was notable that 11 of 17 (64.7%) of the plasmas from patients with early-stage ovarian cancers scored positive for PPIA peptides, while 32 of 46 (69.6%) of the plasmas from patients with more advanced cancers scored positive (combining phase 2b and phase 3; Dataset S7). For comparison, CA125 levels were measured in a subset of the same cohort. CA125 was elevated in 20 of 63 ovarian cancer patients and in none of 50 healthy controls. The elevations in CA125 and PPIA did not completely overlap, so that the sensitivity for detection of either CA125 or PPIA levels was 74.6% (95% CI, 62.1-84.7%), higher than either alone (see Venn diagram in FIG. 7).

[0097] These results demonstrate that SAFE-SRM can be used as a generalizable method for discovering disease-specific peptides in the circulation. Specifically, the SAFE-SRM method was used to identify and validate peptides from PPIA that can be used as a circulating peptide marker to identify mammals as having ovarian cancer.

### OTHER EMBODIMENTS

[0098] It is to be understood that while the invention has been described in conjunction with the detailed description thereof, the foregoing description is intended to illustrate and not limit the scope of the invention, which is defined by the scope of the appended claims. Other aspects, advantages, and modifications are within the scope of the following claims.

Lengthy table referenced here
US20210063401A1-20210304-T00001
Please refer to the end of the specification for access instructions.

LENGTHY TABLES
The patent application contains a lengthy table section. A copy of the table is available in electronic form from the USPTO web site (https://seqdata.uspto.gov/?pageRequest=docDetail&DocID=US20210063401A1). An electronic copy of the table will also be available from the USPTO upon request and payment of the fee set forth in 37 CFR 1.19(b)(3).

The application's sequence listing, which the Patent Office published only in electronic form, follows.

SEQUENCE LISTING (6646 sequences)

SEQ ID NO: 1 - protein, 9 aa, Unknown
  source: /note="Description of Unknown: PPIA peptide fragment"
VSFELFADK

SEQ ID NO: 2 - protein, 9 aa, Unknown
  source: /note="Description of Unknown: PPIA peptide fragment"
FEDENFILK

SEQ ID NO: 3 - protein, 10 aa, Artificial Sequence
  source: /note="Description of Artificial Sequence: Synthetic peptide"
IQLVEEELDR

SEQ ID NO: 4 - protein, 6 aa, Artificial Sequence
  source: /note="Description of Artificial Sequence: Synthetic peptide"
VILHLK

SEQ ID NO: 5 - protein, 9 aa, Artificial Sequence
  source: /note="Description of Artificial Sequence: Synthetic peptide"
IILLFDAHK

SEQ ID NO: 6 - protein, 14 aa, Artificial Sequence
  source: /note="Description of Artificial Sequence: Synthetic peptide"
TLAESALQLLYTAK

SEQ ID NO: 7 - protein, 7 aa, Artificial Sequence
  source: /note="Description of Artificial Sequence: Synthetic peptide"
LLGHLVK

SEQ ID NO: 8 - protein, 8 aa, Artificial Sequence
  source: /note="Description of Artificial Sequence: Synthetic peptide"
GLVGEIIK

SEQ ID NO: 9 - protein, 7 aa, Artificial Sequence
  source: /note="Description of Artificial Sequence: Synthetic peptide"
DEIESVK

SEQ ID NO: 10 - protein, 10 aa, Artificial Sequence
  source: /note="Description of Artificial Sequence: Synthetic peptide"
VGSAKPGLQK

SEQ ID NO: 11 - protein, 6 aa, Artificial Sequence
  source: /note="Description of Artificial Sequence: Synthetic peptide"
ETIVLK

SEQ ID NO: 12 - protein, 8 aa, Artificial Sequence
  source: /note="Description of Artificial Sequence: Synthetic peptide"
SIVNYKPK

SEQ ID NO: 13 - protein, 11 aa, Artificial Sequence
  source: /note="Description of Artificial Sequence: Synthetic peptide"
DLQFVEVTDVK

SEQ ID NO: 14 - protein, 13 aa, Artificial Sequence
  source: /note="Description of Artificial Sequence: Synthetic peptide"
TLLGDGPVVTDPK

SEQ ID NO: 15 - protein, 11 aa, Artificial Sequence
  source: /note="Description of Artificial Sequence: Synthetic peptide"
HFTILDAPGHK

SEQ ID NO: 16 - protein, 10 aa, Artificial Sequence
  source: /note="Description of Artificial Sequence: Synthetic peptide"
LVDKFLEDVK

SEQ ID NO: 17 - protein, 7 aa, Artificial Sequence
  source: /note="Description of Artificial Sequence: Synthetic peptide"
KIPVVFR

SEQ ID NO: 18 - protein, 8 aa, Artificial Sequence
  source: /note="Description of Artificial Sequence: Synthetic peptide"
FPVIQHFK

SEQ ID NO: 19 - protein, 9 aa, Artificial Sequence
  source: /note="Description of Artificial Sequence: Synthetic peptide"
FFLSHPAYR

SEQ ID NO: 20 - protein, 9 aa, Artificial Sequence
  source: /note="Description of Artificial Sequence: Synthetic peptide"
LFAGLVHVK

SEQ ID NO: 21 - protein, 16 aa, Artificial Sequence
  source: /note="Description of Artificial Sequence: Synthetic peptide"
VLDFEHFLPMLQTVAK

SEQ ID NO: 22 - protein, 16 aa, Artificial Sequence
  source: /note="Description of Artificial Sequence: Synthetic peptide"
LLGNVLVCVLAHHFGK

SEQ ID NO: 23 - protein, 11 aa, Unknown
  source: /note="Description of Unknown: K-Ras wild-type (WT) peptide"
LVVVGAGGVGK

SEQ ID NO: 24 - protein, 12 aa, Homo sapiens
AAAATGTIFTFR

SEQ ID NO: 25 - protein, 7 aa, Homo sapiens
AAALLPK

SEQ ID NO: 26 - protein, 7 aa, Homo sapiens
AAANQMR

SEQ ID NO: 27 - protein, 8 aa, Homo sapiens
AAAPNTPK

SEQ ID NO: 28 - protein, 7 aa, Homo sapiens
AACLLPK

SEQ ID NO: 29 - protein, 13 aa, Homo sapiens
AADDTWEPFASGK

SEQ ID NO: 30 - protein, 17 aa, Homo sapiens
AADIEQQAVFAVFDENK

SEQ ID NO: 31 - protein, 28 aa, Homo sapiens
AAEAAAAPAESAAPAAGEEPSKEEGEPK

SEQ ID NO: 32 - protein, 8 aa, Homo sapiens
AAFDQRMK

SEQ ID NO: 33 - protein, 7 aa, Homo sapiens
AAFNSGK

SEQ ID NO: 34 - protein, 16 aa, Homo sapiens
AAGNECPELQPPVHGK

SEQ ID NO: 35 - protein, 5 aa, Homo sapiens
AAINK

SEQ ID NO: 36 - protein, 7 aa, Homo sapiens
AAIQALR

SEQ ID NO: 37 - protein, 8 aa, Homo sapiens
AAIQALRK

SEQ ID NO: 38 - protein, 12 aa, Homo sapiens
AAISGENAGLVR

SEQ ID NO: 39 - protein, 21 aa, Homo sapiens
AALGKLPQQANDYLNSFNWER

SEQ ID NO: 40 - protein, 7 aa, Homo sapiens
AALQALR

SEQ ID NO: 41 - protein, 14 aa, Homo sapiens
AALSGANVLTLIEK

SEQ ID NO: 42 - protein, 22 aa, Homo sapiens
AALTELSLGSAYQAMILGVDSK

SEQ ID NO: 43 - protein, 10 aa, Homo sapiens
AAMLIRPLKL

SEQ ID NO: 44 - protein, 14 aa, Homo sapiens
AAMVGMLANFLGFR

SEQ ID NO: 45 - protein, 10 aa, Homo sapiens
AANFENHSGK

SEQ ID NO: 46 - protein, 15 aa, Homo sapiens
AANSLEAFIFETQDK

SEQ ID NO: 47 - protein, 16 aa, Homo sapiens
AAPGQEPPEHMAELQR

SEQ ID NO: 48 - protein, 9 aa, Homo sapiens
AAPGYHMAK

SEQ ID NO: 49 - protein, 8 aa, Homo sapiens
AAQEEYVK

SEQ ID NO: 50 - protein, 15 aa, Homo sapiens
AAQVTIQSSGTFSSK

SEQ ID NO: 51 - protein, 23 aa, Homo sapiens
AAQVTIQSSGTFSSKFQVDNNNR

SEQ ID NO: 52 - protein, 7 aa, Homo sapiens
AARALQK

SEQ ID NO: 53 - protein, 8 aa, Homo sapiens
AARVIIEK

SEQ ID NO: 54 - protein, 11 aa, Homo sapiens
AASGTQNNVLR

SEQ ID NO: 55 - protein, 13 aa, Homo sapiens
AASGTTGTYQEWK

SEQ ID NO: 56 - protein, 15 aa, Homo sapiens
AASGTTGTYQEWKDK

SEQ ID NO: 57 - protein, 12 aa, Homo sapiens
AATGECTATVGK

SEQ ID NO: 58 - protein, 13 aa, Homo sapiens
AATGECTATVGKR

SEQ ID NO: 59 - protein, 15 aa, Homo sapiens
AATVGSLAGQPLQER

SEQ ID NO: 60 - protein, 8 aa, Homo sapiens
AAVHLEGK

SEQ ID NO: 61 - protein, 13 aa, Homo sapiens
AAVYHHFISDGVR

SEQ ID NO: 62 - protein, 14 aa, Homo sapiens
AAVYHHFISDGVRK

SEQ ID NO: 63 - protein, 34 aa, Homo sapiens
AAVYQPQPHPQPPPYGHCVTDSGVVYSVGMQWLK

SEQ ID NO: 64 - protein, 5 aa, Homo sapiens
AAWGK

SEQ ID NO: 65 - protein, 28 aa, Homo sapiens
ACPSHQPDISSGLELPFPPGVPTLDNIK

SEQ ID NO: 66 - protein, 14 aa, Homo sapiens
ADAEGESDLENSRK

SEQ ID NO: 67 - protein, 12 aa, Homo sapiens
ADDGRPFPQVIK

SEQ ID NO: 68 - protein, 16 aa, Homo sapiens
ADGESCSASMMYQEGK

SEQ ID NO: 69 - protein, 12 aa, Homo sapiens
ADGLAVIGVLMK

SEQ ID NO: 70 - protein, 17 aa, Homo sapiens
ADGSPVKAGVETTKPSK

SEQ ID NO: 71 - protein, 11 aa, Homo sapiens
ADGSYAAWLSR

SEQ ID NO: 72 - protein, 11 aa, Homo sapiens
ADHDALLFHLK

SEQ ID NO: 73 - protein, 15 aa, Homo sapiens
ADHHATNGVVHLIDK

SEQ ID NO: 74 - protein, 5 aa, Homo sapiens
ADIEK

SEQ ID NO: 75 - protein, 5 aa, Homo sapiens
ADITK

SEQ ID NO: 76 - protein, 13 aa, Homo sapiens
ADKPLSIHPQGIR

SEQ ID NO: 77 - protein, 5 aa, Homo sapiens
ADLEK

SEQ ID NO: 78 - protein, 12 aa, Homo sapiens
ADLEKLTSLSDR

SEQ ID NO: 79 - protein, 18 aa, Homo sapiens
ADLEMQIESLTEELAYLK

SEQ ID NO: 80 - protein, 16 aa, Homo sapiens
ADLFYDVEALDLESPK

SEQ ID NO: 81 - protein, 21 aa, Homo sapiens
ADLLLSTQPGREEGSPLELER

SEQ ID NO: 82 - protein, 10 aa, Homo sapiens
ADLSGITGAR

SEQ ID NO: 83 - protein, 20 aa, Homo sapiens
ADLSGITGARNLAVSQVVHK

SEQ ID NO: 84 - protein, 36 aa, Homo sapiens
ADNFLLENTLPAQSTFTLAISAYALSLGDKTHPQFR

SEQ ID NO: 85 - protein, 6 aa, Homo sapiens
ADPFLR

SEQ ID NO: 86 - protein, 15 aa, Homo sapiens
ADRDQYELLCLDNTR

SEQ ID NO: 87 - protein, 24 aa, Homo sapiens
ADSQAQLLLSTVVGVFTAPGLHLK

SEQ ID NO: 88 - protein, 41 aa, Homo sapiens
ADSQAQLLLSTVVGVFTAPGLHLKQPFVQGLALYTPVVLPR

SEQ ID NO: 89 - protein, 23 aa, Homo sapiens
ADSVVDLLSYNVQGSGETTYDHK

SEQ ID NO: 90 - protein, 15 aa, Homo sapiens
ADTAKEVSFDVELPK

SEQ ID NO: 91 - protein, 32 aa, Homo sapiens
ADTHDEILEGLNFNLTEIPEAQIHEGFQELLR

SEQ ID NO: 92 - protein, 9 aa, Homo sapiens
ADTNQLADK

SEQ ID NO: 93 - protein, 15 aa, Homo sapiens
ADVLTTGAGNPVGDK

SEQ ID NO: 94 - protein, 24 aa, Homo sapiens
ADVQAHGEGQEFSITCLVDEEEMK

SEQ ID NO: 95 - protein, 25 aa, Homo sapiens
ADVQAHGEGQEFSITCLVDEEEMKK

SEQ ID NO: 96 - protein, 5 aa, Homo sapiens
ADYEK

SEQ ID NO: 97 - protein, 13 aa, Homo sapiens
AEAQAQYSAAVAK

SEQ ID NO: 98 - protein, 8 aa, Homo sapiens
AEAQVELR

SEQ ID NO: 99 - protein, 9 aa, Homo sapiens
AEASQLGHK

SEQ ID NO: 100 - protein, 21 aa, Homo sapiens
AEATTLHVAPQGTAMAVSTFR

SEQ ID NO: 101 - protein, 15 aa, Homo sapiens
AEDHFSVIDFNQNIR

SEQ ID NO: 102 - protein, 7 aa, Homo sapiens
AEDLVGK

SEQ ID NO: 103 - protein, 11 aa, Homo sapiens
AEDTALYYCAK

SEQ ID NO: 104 - protein, 20 aa, Homo sapiens
AEEEHLGILGPQLHADVGDK

SEQ ID NO: 105 - protein, 22 aa, Homo sapiens
AEEEHLGILGPQLHADVGDKVK

SEQ ID NO: 106 - protein, 23 aa, Homo sapiens
AEEHTVVLTVTGEPCHFPFQYHR

SEQ ID NO: 107 - protein, 7 aa, Homo sapiens
AEEILSR

SEQ ID NO: 108 - protein, 7 aa, Homo sapiens
AEELLSR

SEQ ID NO: 109 - protein, 6 aa, Homo sapiens
AEFAER

SEQ ID NO: 110 - protein, 8 aa, Homo sapiens
AEFAEVSK

SEQ ID NO: 111 - protein, 9 aa, Homo sapiens
AEFQDALEK

SEQ ID NO: 112 - protein, 10 aa, Homo sapiens
AEGDVAALNR

SEQ ID NO: 113 - protein, 11 aa, Homo sapiens
AEGDVAALNRR

SEQ ID NO: 114 - protein, 8 aa, Homo sapiens
AEIEYLEK

SEQ ID NO: 115 - protein, 9 aa, Homo sapiens
AEISFEDRK

SEQ ID NO: 116 - protein, 12 aa, Homo sapiens
AELDREDFEHVK

SEQ ID NO: 117 - protein, 8 aa, Homo sapiens
AELQEGAR

SEQ ID NO: 118 - protein, 13 aa, Homo sapiens
AEMADQAAAWLTR

SEQ ID NO: 119 - protein, 16 aa, Homo sapiens
AEPHFLSILQHLLLVR

SEQ ID NO: 120 - protein, 13 aa, Homo sapiens
AEPLAFTFSHDYK

SEQ ID NO: 121 - protein, 23 aa, Homo sapiens
AEPLAFTFSHDYKGSTSHHLVSR

SEQ ID NO: 122 - protein, 12 aa, Homo sapiens
AETGDKVYVHLK

SEQ ID NO: 123 - protein, 10 aa, Homo sapiens
AEVDDVIQVR

SEQ ID NO: 124 - protein, 7 aa, Homo sapiens
AEVSELK

SEQ ID NO: 125 - protein, 43 aa, Homo sapiens
AFAVAFGINVLAANVHHPVLGMTGSGIHTPLESFWYHDMENPK

SEQ ID NO: 126 - protein, 9 aa, Homo sapiens
AFDICPLVK

SEQ ID NO: 127 - protein, 7 aa, Homo sapiens
AFEEAEK

SEQ ID NO: 128 - protein, 15 aa, Homo sapiens
AFGHHAVSLLDGGLR

SEQ ID NO: 129 - protein, 8 aa, Homo sapiens
AFHFYLTR

SEQ ID NO: 130 - protein, 27 aa, Homo sapiens
AFHTASVLGNYMVVYGGNVHTHYQEEK

SEQ ID NO: 131 - protein, 12 aa, Homo sapiens
AFIQLWAFDAVK

SEQ ID NO: 132 - protein, 20 aa, Homo sapiens
AFITNFSMIIDGMTYPGIIK

SEQ ID NO: 133 - protein, 9 aa, Homo sapiens
AFKAWAVAR

SEQ ID NO: 134 - protein, 23 aa, Homo sapiens
AFLEVNEEGSEAAASTAVVIAGR

SEQ ID NO: 135 - protein, 7 aa, Homo sapiens
AFLLTPR

SEQ ID NO: 136 - protein, 14 aa, Homo sapiens
AFLSSHCYNAATIK

SEQ ID NO: 137 - protein, 15 aa, Homo sapiens
AFLSSHLQDLSTIVR

SEQ ID NO: 138 - protein, 6 aa, Homo sapiens
AFNAVK

SEQ ID NO: 139 - protein, 12 aa, Homo sapiens
AFQAVQNLPTKK

SEQ ID NO: 140 - protein, 17 aa, Homo sapiens
AFQPFFVELTMPYSVIR

SEQ ID NO: 141 - protein, 7 aa, Homo sapiens
AFQYHSK

SEQ ID NO: 142 - protein, 14 aa, Homo sapiens
AFSDRNTLIIYLDK

SEQ ID NO: 143 - protein, 7 aa, Homo sapiens
AFSSYQK

SEQ ID NO: 144 - protein, 8 aa, Homo sapiens
AFSVNIFK

SEQ ID NO: 145 - protein, 6 aa, Homo sapiens
AFTNSK

SEQ ID NO: 146 - protein, 6 aa, Homo sapiens
AFVFPK

SEQ ID NO: 147 - protein, 10 aa, Homo sapiens
AFWLDVSHNR

SEQ ID NO: 148 - protein, 9 aa, Homo sapiens
AGAEPASER

SEQ ID NO: 149 - protein, 10 aa, Homo sapiens
AGAHLQGGAK

SEQ ID NO: 150 - protein, 13 aa, Homo sapiens
AGALNSNDAFVLK

SEQ ID NO: 151 - protein, 12 aa, Homo sapiens
AGALQLLLVGDK

SEQ ID NO: 152 - protein, 23 aa, Homo sapiens
AGDEAVFAQYDSFHVDSAAEYYR

SEQ ID NO: 153 - protein, 14 aa, Homo sapiens
AGDFLEANYMNLQR

SEQ ID NO: 154 - protein, 15 aa, Homo sapiens
AGEAGKLEEVMQELR

SEQ ID NO: 155 - protein, 25 aa, Homo sapiens
AGELEVFNGYFVHFFAPDNLDPIPK

SEQ ID NO: 156 - protein, 11 aa, Homo sapiens
AGEQDATIHLK

SEQ ID NO: 157 - protein, 14 aa, Homo sapiens
AGEQVTYTCATYYK

SEQ ID NO: 158 - protein, 10 aa, Homo sapiens
AGEVQEPELR

SEQ ID NO: 159 - protein, 10 aa, Homo sapiens
AGFAGDDAPR

SEQ ID NO: 160 - protein, 40 aa, Homo sapiens
AGFEWNEDGAGTTPSPGLQPAHLTFPLDYHLNQPFIFVLR

SEQ ID NO: 161 - protein, 7 aa, Homo sapiens
AGFLDLK

SEQ ID NO: 162 - protein, 11 aa, Homo sapiens
AGFSWIEVTFK

SEQ ID NO: 163 - protein, 12 aa, Homo sapiens
AGGSWDLAVQER

SEQ ID NO: 164 - protein, 11 aa, Homo sapiens
AGHIAWTSSGK

SEQ ID NO: 165 - protein, 5 aa, Homo sapiens
AGIIK

SEQ ID NO: 166 - protein, 5 aa, Homo sapiens
AGILK

SEQ ID NO: 167 - protein, 8 aa, Homo sapiens
AGISFIIK

SEQ ID NO: 168 - protein, 11 aa, Homo sapiens
AGKEPGLQIWR

SEQ ID NO: 169 - protein, 16 aa, Homo sapiens
AGLAASLAGPHSIVGR

SEQ ID NO: 170 - protein, 5 aa, Homo sapiens
AGLEK

SEQ ID NO: 171 - protein, 5 aa, Homo sapiens
AGLLK

SEQ ID NO: 172 - protein, 14 aa, Homo sapiens
AGLLRPDYALLGHR

SEQ ID NO: 173 - protein, 14 aa, Homo sapiens
AGLQAFFQVQECNK

SEQ ID NO: 174 - protein, 11 aa, Homo sapiens
AGLQSLEASGR

SEQ ID NO: 175 - protein, 10 aa, Homo sapiens
AGLSHMLIQR

SEQ ID NO: 176 - protein, 14 aa, Homo sapiens
AGNNMLLVGVHGPR

SEQ ID NO: 177 - protein, 15 aa, Homo sapiens
AGPHCPTAQLIATLK

SEQ ID NO: 178 - protein, 7 aa, Homo sapiens
AGQLSVK

SEQ ID NO: 179 - protein, 14 aa, Homo sapiens
AGTFFWSVVIPHER

SEQ ID NO: 180 - protein, 14 aa, Homo sapiens
AGTPYTVTLHGEVR

SEQ ID NO: 181 - protein, 17 aa, Homo sapiens
AGTQIENIEEDFRDGLK

SEQ ID NO: 182 - protein, 10 aa, Homo sapiens
AGVETTKPSK

SEQ ID NO: 183 - protein, 11 aa, Homo sapiens
AGVLAHLEEER

SEQ ID NO: 184 - protein, 20 aa, Homo sapiens
AHFSPSNIILDFPAAGSAAR

SEQ ID NO: 185 - protein, 9 aa, Homo sapiens
AHIPPLGLK

SEQ ID NO: 186 - protein, 14 aa, Homo sapiens
AHLDIAGSLEGHLR

SEQ ID NO: 187 - protein, 6 aa, Homo sapiens
AHLLLK

SEQ ID NO: 188 - protein, 12 aa, Homo sapiens
AHLLSLVDVMQR

SEQ ID NO: 189 - protein, 6 aa, Homo sapiens
AHLNIK

SEQ ID NO: 190 - protein, 15 aa, Homo sapiens
AHNAFGGEGVYAIAR

SEQ ID NO: 191 - protein, 13 aa, Homo sapiens
AHSSMVGVNLPQK

SEQ ID NO: 192 - protein, 17 aa, Homo sapiens
AHTDVGPGPESSPVLVR

SEQ ID NO: 193 - protein, 17 aa, Homo sapiens
AHTSFQISLSVSYTGSR

SEQ ID NO: 194 - protein, 7 aa, Homo sapiens
AHVDALR

SEQ ID NO: 195 - protein, 7 aa, Homo sapiens
AHVDEFK

SEQ ID NO: 196 - protein, 20 aa, Homo sapiens
AHVIVMAATNRPNSIDPALR

SEQ ID NO: 197 - protein, 13 aa, Homo sapiens
AHVSFKPTVAQQR

SEQ ID NO: 198 - protein, 6 aa, Homo sapiens
AHYDLR

SEQ ID NO: 199 - protein, 14 aa, Homo sapiens
AHYGGFTVQNEANK

SEQ ID NO: 200 - protein, 21 aa, Homo sapiens
AHYGGFTVQNEANKYQISVNK

SEQ ID NO: 201 - protein, 38 aa, Homo sapiens
AIAANEADAVTLDAGLVYDAYLAPNNLKPVVAEFYGSK

SEQ ID NO: 202 - protein, 52 aa, Homo sapiens
AIAANEADAVTLDAGLVYDAYLAPNNLKPVVAEFYGSKEDPQTFYYAVAVVK

SEQ ID NO: 203 - protein, 21 aa, Homo sapiens
AIAYSSLSQSYLYIDWTDNHK

SEQ ID NO: 204 - protein, 17 aa, Homo sapiens
AIDEDCSQYEPIPGSQK

SEQ ID NO: 205 - protein, 7 aa, Homo sapiens
AIDLVTK

SEQ ID NO: 206 - protein, 12 aa, Homo sapiens
AIEDYINEFSVR

SEQ ID NO: 207 - protein, 13 aa, Homo sapiens
AIEDYINEFSVRK

SEQ ID NO: 208 - protein, 9 aa, Homo sapiens
AIENELLAR

SEQ ID NO: 209 - protein, 13 aa, Homo sapiens
AIFSVGPVSPNRR

SEQ ID NO: 210 - protein, 13 aa, Homo sapiens
AIFSVGPVSPSRR

SEQ ID NO: 211 - protein, 10 aa, Homo sapiens
AIFYMNNPSR

SEQ ID NO: 212 - protein, 11 aa, Homo sapiens
AIGPSQTHTIR

SEQ ID NO: 213 - protein, 19 aa, Homo sapiens
AIGSASEGAQSSLQEVYHK

SEQ ID NO: 214 - protein, 11 aa, Homo sapiens
AIGYLNTGYQR

SEQ ID NO: 215 - protein, 18 aa, Homo sapiens
AIHCPRPHDFENGEYWPR

SEQ ID NO: 216 - protein, 10 aa, Homo sapiens
AIHLDLEEYR

SEQ ID NO: 217 - protein, 7 aa, Homo sapiens
AIHLLLR

SEQ ID NO: 218 - protein, 8 aa, Homo sapiens
AIHSWLTR

SEQ ID NO: 219 - protein, 41 aa, Homo sapiens
AIHVHQFGDLSQGCESTGPHYNPLAVPHPQHPGDFGNFAVR

SEQ ID NO: 220 - protein, 6 aa, Homo sapiens
AIISNK

SEQ ID NO: 221 - protein, 12 aa, Homo sapiens
AIKANVFVQLPR

SEQ ID NO: 222 - protein, 7 aa, Homo sapiens
AILFVPR

SEQ ID NO: 223 - protein, 5 aa, Homo sapiens
AIMEK

SEQ ID NO: 224 - protein, 10 aa, Homo sapiens
AIMEKLEMSK

SEQ ID NO: 225 - protein, 18 aa, Homo sapiens
AIMTYVSSFYHAFSGAQK

SEQ ID NO: 226 - protein, 9 aa, Homo sapiens
AIPVTQYLK

SEQ ID NO: 227 - protein, 7 aa, Homo sapiens
AIQEMRR

SEQ ID NO: 228 - protein, 23 aa, Homo sapiens
AIQLTYNPDESSKPNMIDAATLK

SEQ ID NO: 229 - protein, 6 aa, Homo sapiens
AIQSLK

SEQ ID NO: 230 - protein, 6 aa, Homo sapiens
AIQVVR

SEQ ID NO: 231 - protein, 28 aa, Homo sapiens
AISGGSIQIENGYFVHYFAPEGLTTMPK

SEQ ID NO: 232 - protein, 15 aa, Homo sapiens
AISGLTIDGHAVGAK

SEQ ID NO: 233 - protein, 9 aa, Homo sapiens
AISVVSRLK

SEQ ID NO: 234 - protein, 23 aa, Homo sapiens
AITPPHPASQANIIFDITEGNLR

SEQ ID NO: 235 - protein, 12 aa, Homo sapiens
AKDLHLSDVFLK

SEQ ID NO: 236 - protein, 18 aa, Homo sapiens
AKEQYAVVGHSAHIVTLK

SEQ ID NO: 237 - protein, 12 aa, Homo sapiens
AKFEELNMDLFR

SEQ ID NO: 238 - protein, 11 aa, Homo sapiens
AKIDQNVEELK

SEQ ID NO: 239 - protein, 11 aa, Homo sapiens
AKLEEQAQQIR

SEQ ID NO: 240 - protein, 17 aa, Homo sapiens
AKLGNFPWQAFTSIHGR

SEQ ID NO: 241 - protein, 17 aa, Homo sapiens
AKLIALTLLGMGLALFR

SEQ ID NO: 242 - protein, 13 aa, Homo sapiens
AKLPDATPTELAK

SEQ ID NO: 243 - protein, 11 aa, Homo sapiens
AKMESLGITSR

SEQ ID NO: 244 - protein, 9 aa, Homo sapiens
AKPALEDLR

SEQ ID NO: 245 - protein, 14 aa, Homo sapiens
AKPSAPVVSGPAAR

SEQ ID NO: 246 - protein, 14 aa, Homo sapiens
AKPSAPVVSGPAVR

SEQ ID NO: 247 - protein, 12 aa, Homo sapiens
AKVQPYLDDFQK

SEQ ID NO: 248 - protein, 16 aa, Homo sapiens
AKWEMPFDPQDTHQSR

SEQ ID NO: 249 - protein, 7 aa, Homo sapiens
ALAEDVK

SEQ ID NO: 250 - protein, 7 aa, Homo sapiens
ALAGNPK

SEQ ID NO: 251 - protein, 22 aa, Homo sapiens
ALALPPLGLAPLLNLWAKPQGR

SEQ ID NO: 252 - protein, 9 aa, Homo sapiens
ALAMGYKPK

SEQ ID NO: 253 - protein, 8 aa, Homo sapiens
ALAPEYAK

SEQ ID NO: 254 - protein, 8 aa, Homo sapiens
ALASIDSK

SEQ ID NO: 255 - protein, 11 aa, Homo sapiens
ALASQLQDSLK

SEQ ID NO: 256 - protein, 7 aa, Homo sapiens
ALATYSK

SEQ ID NO: 257 - protein, 11 aa, Homo sapiens
ALDFAVGEYNK

SEQ ID NO: 258 - protein, 11 aa, Homo sapiens
ALDGAFTEENR

SEQ ID NO: 259 - protein, 7 aa, Homo sapiens
ALDLINK

SEQ ID NO: 260 - protein, 8 aa, Homo sapiens
ALDLINKR

SEQ ID NO: 261 - protein, 7 aa, Homo sapiens
ALDLSLK

SEQ ID NO: 262 - protein, 13 aa, Homo sapiens
ALDQYLMEFNACR

SEQ ID NO: 263 - protein, 11 aa, Homo sapiens
ALDVMVSTFHK

SEQ ID NO: 264 - protein, 10 aa, Homo sapiens
ALEATTEHIR

SEQ ID NO: 265 - protein, 12 aa, Homo sapiens
ALEESNYELEGK

SEQ ID NO: 266 - protein, 11 aa, Homo sapiens
ALEFLQLHNGR

SEQ ID NO: 267 - protein, 19 aa, Homo sapiens
ALEILQEEDLIDEDDIPVR

SEQ ID NO: 268 - protein, 9 aa, Homo sapiens
ALELEQERK

SEQ ID NO: 269 - protein, 7 aa, Homo sapiens
ALENSPK

SEQ ID NO: 270 - protein, 8 aa, Homo sapiens
ALEQALEK

SEQ ID NO: 271 - protein, 11 aa, Homo sapiens
ALEQDLPVNIK

SEQ ID NO: 272 - protein, 17 aa, Homo sapiens
ALESPERPFLAILGGAK

SEQ ID NO: 273 - protein, 17 aa, Homo sapiens
ALEVSQAPVIFSHSAAR

SEQ ID NO: 274 - protein, 9 aa, Homo sapiens
ALFVSEEEK

SEQ ID NO: 275 - protein, 10 aa, Homo sapiens
ALFVSEEEKK

SEQ ID NO: 276 - protein, 10 aa, Homo sapiens
ALGDLISATK

SEQ ID NO: 277 - protein, 20 aa, Homo sapiens
ALGGDLASINNKEEQQTIWR

SEQ ID NO: 278 - protein, 11 aa, Homo sapiens
ALGHLDLSGNR

SEQ ID NO: 279 - protein, 23 aa, Homo sapiens
ALGISPFHEHAEVVFTANDSGPR

SEQ ID NO: 280 - protein, 24 aa, Homo sapiens
ALGISPFHEHAEVVFTANDSGPRR

SEQ ID NO: 281 - protein, 7 aa, Homo sapiens
ALHFVFK

SEQ ID NO: 282 - protein, 14 aa, Homo sapiens
ALHQVFEHMLDVSK

SEQ ID NO: 283 - protein, 14 aa, Homo sapiens
ALHSDRPPSASQPR

SEQ ID NO: 284 - protein, 8 aa, Homo sapiens
ALHVTNIK

SEQ ID NO: 285 - protein, 16 aa, Homo sapiens
ALIEVLQPLIAEHQAR

SEQ ID NO: 286 - protein, 15 aa, Homo sapiens
ALIFVSHGAGEHSGR

SEQ ID NO: 287 - protein, 18 aa, Homo sapiens
ALKYEVQGEVFTKPQLWP

SEQ ID NO: 288 - protein, 9 aa, Homo sapiens
ALLAFQESK

SEQ ID NO: 289 - protein, 15 aa, Homo sapiens
ALLAYAFALAGNQDK

SEQ ID NO: 290 - protein, 16 aa, Homo sapiens
ALLAYAFALAGNQDKR

SEQ ID NO: 291 - protein, 12 aa, Homo sapiens
ALLAYAFSLLGK

SEQ ID NO: 292 - protein, 7 aa, Homo sapiens
ALLFVPR

SEQ ID NO: 293 - protein, 15 aa, Homo sapiens
ALLVGEHLNIIVTPK

SEQ ID NO: 294 - protein, 14 aa, Homo sapiens
ALLVHGGHRPSTAR

SEQ ID NO: 295 - protein, 8 aa, Homo sapiens
ALMAAEDK

SEQ ID NO: 296 - protein, 8 aa, Homo sapiens
ALMDETMK

SEQ ID NO: 297 - protein, 11 aa, Homo sapiens
ALMDETMKELK

SEQ ID NO: 298 - protein, 16 aa, Homo sapiens
ALNHLPLEYNSALYSR

SEQ ID NO: 299 - protein, 11 aa, Homo sapiens
ALNSIIDVYHK

SEQ ID NO: 300 - protein, 12 aa, Homo sapiens
ALPEVHYHLGQK

SEQ ID NO: 301 - protein, 14 aa, Homo sapiens
ALPGEQQPLHALTR

SEQ ID NO: 302 - protein, 20 aa, Homo sapiens
ALPGQLKPFETLLSQNQGGK

SEQ ID NO: 303 - protein, 15 aa, Homo sapiens
ALPLALVLHELGAGR

SEQ ID NO: 304 - protein, 9 aa, Homo sapiens
ALPPLRLPR

SEQ ID NO: 305 - protein, 8 aa, Homo sapiens
ALPTTYEK

SEQ ID NO: 306 - protein, 8 aa, Homo sapiens
ALQASALK

SEQ ID NO: 307 - protein, 12 aa, Homo sapiens
ALQDQLVLVAAK

SEQ ID NO: 308 - protein, 15 aa, Homo sapiens
ALQERDYIFGNYIER

SEQ ID NO: 309 - protein, 8 aa, Homo sapiens
ALQEYAAK

SEQ ID NO: 310 - protein, 6 aa, Homo sapiens
ALQEYR

SEQ ID NO: 311 - protein, 8 aa, Homo sapiens
ALQTEMAR

SEQ ID NO: 312 - protein, 6 aa, Homo sapiens
ALQVVR

SEQ ID NO: 313 - protein, 15 aa, Homo sapiens
ALRDFALQNPSAVPR

SEQ ID NO: 314 - protein, 8 aa, Homo sapiens
ALSFFHQK

SEQ ID NO: 315 - protein, 7 aa, Homo sapiens
ALSLHIK

SEQ ID NO: 316 - protein, 10 aa, Homo sapiens
ALSNVEGFER

SEQ ID NO: 317 - protein, 11 aa, Homo sapiens
ALSSEWKPEIR

SEQ ID NO: 318 - protein, 12 aa, Homo sapiens
ALSTDPAAPNLK

SEQ ID NO: 319 - protein, 9 aa, Homo sapiens
ALTDMPQMR

SEQ ID NO: 320 - protein, 9 aa, Homo sapiens
ALTFELTLR

SEQ ID NO: 321 - protein, 11 aa, Homo sapiens
ALTGGIAHLFK

SEQ ID NO: 322 - protein, 11 aa, Homo sapiens
ALTQTGGPHVK

SEQ ID NO: 323 - protein, 7 aa, Homo sapiens
ALVDTLK

SEQ ID NO: 324 - protein, 16 aa, Homo sapiens
ALVEGVDQLFTDYQIK

SEQ ID NO: 325 - protein, 13 aa, Homo sapiens
ALVEQGFTVPEIK

SEQ ID NO: 326 - protein, 7 aa, Homo sapiens
ALVILAK

SEQ ID NO: 327 - protein, 21 aa, Homo sapiens
ALVLIAFAQYLQQCPFEDHVK

SEQ ID NO: 328 - protein, 10 aa, Homo sapiens
ALVQQMEQLR

SEQ ID NO: 329 - protein, 5 aa, Homo sapiens
ALWEK

SEQ ID NO: 330 - protein, 11 aa, Homo sapiens
ALWEKPFISSR

SEQ ID NO: 331 - protein, 7 aa, Homo sapiens
ALYAQAR

SEQ ID NO: 332 - protein, 12 aa, Homo sapiens
ALYLQYTDETFR

SEQ ID NO: 333 - protein, 18 aa, Homo sapiens
ALYLSDNDFEILPPDIGK

SEQ ID NO: 334 - protein, 9 aa, Homo sapiens
ALYVHGGYK

SEQ ID NO: 335 - protein, 15 aa, Homo sapiens
ALYWVNGQVPDGVSK

SEQ ID NO: 336 - protein, 17 aa, Homo sapiens
ALYYDLISSPDIHGTYK

SEQ ID NO: 337 - protein, 10 aa, Homo sapiens
AMAVEDIISR

SEQ ID NO: 338 - protein, 10 aa, Homo sapiens
AMFKDLLSSK

SEQ ID NO: 339 - protein, 7 aa, Homo sapiens
AMLVVHK

SEQ ID NO: 340 - protein, 11 aa, Homo sapiens
AMQHISYLNSR

SEQ ID NO: 341 - protein, 5 aa, Homo sapiens
AMTAK

SEQ ID NO: 342 - protein, 19 aa, Homo sapiens
ANAGKPKDPTFIPAPIQAK

SEQ ID NO: 343 - protein, 11 aa, Homo sapiens
ANHEEVLAAGK

SEQ ID NO: 344 - protein, 6 aa, Homo sapiens
ANINLK

SEQ ID NO: 345 - protein, 6 aa, Homo sapiens
ANLFNK

SEQ ID NO: 346 - protein, 12 aa, Homo sapiens
ANLFNKLVTELR

SEQ ID NO: 347 - protein, 15 aa, Homo sapiens
ANLQSVPHASASRPR

SEQ ID NO: 348 - protein, 19 aa, Homo sapiens
ANPTVTLFPPSSEELQANK

SEQ ID NO: 349 - protein, 10 aa, Homo sapiens
ANRPFLVFIR

SEQ ID NO: 350 - protein, 22 aa, Homo sapiens
ANRPFLVFIREVPLNTIIFMGR

SEQ ID NO: 351 - protein, 8 aa, Homo sapiens
ANSFLGEK

SEQ ID NO: 352 - protein, 10 aa, Homo sapiens
ANTFLEEVRK

SEQ ID NO: 353 - protein, 15 aa, Homo sapiens
ANTVQEATFQMELPK

SEQ ID NO: 354 - protein, 16 aa, Homo sapiens
ANTVQEATFQMELPKK

SEQ ID NO: 355 - protein, 9 aa, Homo sapiens
ANVFVQLPR

SEQ ID NO: 356 - protein, 6 aa, Homo sapiens
APADLR

SEQ ID NO: 357 - protein, 10 aa, Homo sapiens
APDFVFYAPR

SEQ ID NO: 358 - protein, 8 aa, Homo sapiens
APEGFAVR

SEQ ID NO: 359 - protein, 17 aa, Homo sapiens
APEPHVEEDDDDELDSK

SEQ ID NO: 360 - protein, 25 aa, Homo sapiens
APEPISTQSHSVLILFHSDNSGENR

SEQ ID NO: 361 - protein, 6 aa, Homo sapiens
APGALR

SEQ ID NO: 362 - protein, 15 aa, Homo sapiens
APGELEHGLITFSTR

SEQ ID NO: 363 - protein, 9 aa, Homo sapiens
APLPLGHIK

SEQ ID NO: 364 - protein, 8 aa, Homo sapiens
APLTKPLK

SEQ ID NO: 365 - protein, 5 aa, Homo sapiens
APLVK

SEQ ID NO: 366 - protein, 9 aa, Homo sapiens
APNHAVVTR

SEQ ID NO: 367 - protein, 8 aa, Homo sapiens
APNVVVTR

SEQ ID NO: 368 - protein, 15 aa, Homo sapiens
APSHQQATTAGSPLR

SEQ ID NO: 369 - protein, 12 aa, Homo sapiens
APSTWLTAYVVK

SEQ ID NO: 370 - protein, 46 aa, Homo sapiens
APVGHFYEPQAPSAEVEMTSYVLLAYLTAQPAPTSEDLTSATNIVK

SEQ ID NO: 371 - protein, 12 aa, Homo sapiens
APWCHTTNSQVR

SEQ ID NO: 372 - protein, 6 aa, Homo sapiens
APYEWK

SEQ ID NO: 373 - protein, 17 aa, Homo sapiens
APYPNYDRDILTIDIGR

SEQ ID NO: 374 - protein, 21 aa, Homo sapiens
AQEQQSLIHTNQAESHTAVGR

SEQ ID NO: 375 - protein, 17 aa, Homo sapiens
AQGFTEDTIVFLPQTDK

SEQ ID NO: 376 - protein, 10 aa, Homo sapiens
AQGYSGLSVK

SEQ ID NO: 377 - protein, 20 aa, Homo sapiens
AQHVFQHAVPQEGKPITNQK

SEQ ID NO: 378 - protein, 9 aa, Homo sapiens
AQIHGGILR

SEQ ID NO: 379 - protein, 15 aa, Homo sapiens
AQIINDAFNLASAHK

SEQ ID NO: 380 - protein, 7 aa, Homo sapiens
AQILPIR

SEQ ID NO: 381 - protein, 7 aa, Homo sapiens
AQIPILR

SEQ ID NO: 382 - protein, 7 aa, Homo sapiens
AQISAYR

SEQ ID NO: 383 - protein, 7 aa, Homo sapiens
AQITGYR

SEQ ID NO: 384 - protein, 13 aa, Homo sapiens
AQLGDLPWQVAIK

SEQ ID NO: 385 - protein, 7 aa, Homo sapiens
AQLVDMK

SEQ ID NO: 386 - protein, 8 aa, Homo sapiens
AQLVDMKR

SEQ ID NO: 387 - protein, 24 aa, Homo sapiens
AQLVPLPPSTYVEFTVSGTDCVAK

SEQ ID NO: 388 - protein, 21 aa, Homo sapiens
AQNLYQELLTQEGQASFQGLK

SEQ ID NO: 389 - protein, 10 aa, Homo sapiens
AQPVQSKPQK

SEQ ID NO: 390 - protein, 22 aa, Homo sapiens
AQPVQVAEGSEPDGFWEALGGK

SEQ ID NO: 391 - protein, 10 aa, Homo sapiens
AQQELEEQTR

SEQ ID NO: 392 - protein, 14 aa, Homo sapiens
AQQVSQGLDVLTAK

SEQ ID NO: 393 - protein, 9 aa, Homo sapiens
AQSIAYHLK

SEQ ID NO: 394 - protein, 14 aa, Homo sapiens
AQVSPTASDMLHMR

SEQ ID NO: 395 - protein, 11 aa, Homo sapiens
AQWANPFDPSK

SEQ ID NO: 396 - protein, 22 aa, Homo sapiens
AQWANPFDPSKTEDSSSFLIDK

SEQ ID NO: 397 - protein, 9 aa, Homo sapiens
AQYEDIAQK

SEQ ID NO: 398 - protein, 9 aa, Homo sapiens
AQYEEIAQR

SEQ ID NO: 399 - protein, 13 aa, Homo sapiens
AQYVLISPEASSR

SEQ ID NO: 400 - protein, 11 aa, Homo sapiens
AREDIFMETLK

SEQ ID NO: 401 - protein, 6 aa, Homo sapiens
ARFNFK

SEQ ID NO: 402 - protein, 9 aa, Homo sapiens
ARIQEAVYK

SEQ ID NO: 403 - protein, 9 aa, Homo sapiens
ARLHEILQK

SEQ ID NO: 404 - protein, 12 aa, Homo sapiens
ARPEDVVNLDLK

SEQ ID NO: 405 - protein, 7 aa, Homo sapiens
ARQLLGR

SEQ ID NO: 406 - protein, 22 aa, Homo sapiens
ASAGLLGAHAAAITAYALTLTK

SEQ ID NO: 407 - protein, 28 aa, Homo sapiens
ASAGLLGAHAAAITAYALTLTKAPADLR

SEQ ID NO: 408 - protein, 25 aa, Homo sapiens
ASASYYEQYHSLNEIYSWIEFITER

SEQ ID NO: 409 - protein, 32 aa, Homo sapiens
ASASYYEQYHSLNEIYSWIEFITERHPDMLTK

SEQ ID NO: 410 - protein, 7 aa, Homo sapiens
ASDNLVK

SEQ ID NO: 411 - protein, 11 aa, Homo sapiens
ASEFLGYWEPR

SEQ ID NO: 412 - protein, 19 aa, Homo sapiens
ASGSLPYTQTLQDHLNSLK

SEQ ID NO: 413 - protein, 12 aa, Homo sapiens
ASHEEVEGLVEK

SEQ ID NO: 414 - protein, 8 aa, Homo sapiens
ASHLGLAR

SEQ ID NO: 415 - protein, 13 aa, Homo sapiens
ASHTAPQVLFSHR

SEQ ID NO: 416 - protein, 20 aa, Homo sapiens
ASHTAPQVLFSHREPPLELK

SEQ ID NO: 417 - protein, 11 aa, Homo sapiens
ASIHEAWTDGK

SEQ ID NO: 418 - protein, 6 aa, Homo sapiens
ASIITK

SEQ ID NO: 419 - protein, 7 aa, Homo sapiens
ASIQYSK

SEQ ID NO: 420 - protein, 18 aa, Homo sapiens
ASKPGWWLLNTEVGENQR

SEQ ID NO: 421 - protein, 5 aa, Homo sapiens
ASLQK

SEQ ID NO: 422 - protein, 13 aa, Homo sapiens
ASMHPVTAMLVGK

SEQ ID NO: 423 - protein, 17 aa, Homo sapiens
ASQHGSDVVIETDFGLR

SEQ ID NO: 424 - protein, 21 aa, Homo sapiens
ASQSVSSYLAWYQQKPGQAPR

SEQ ID NO: 425 - protein, 18 aa, Homo sapiens
ASSEGGTAAGAGLDSLHK

SEQ ID NO: 426 - protein, 8 aa, Homo sapiens
ASSFLGEK

SEQ ID NO: 427 - protein, 12 aa, Homo sapiens
ASSIIDELFQDR

SEQ ID NO: 428 - protein, 10 aa, Homo sapiens
ASSLIEEAKK

SEQ ID NO: 429 - protein, 18 aa, Homo sapiens
ASSQWVVGPSYFVEYLIK

SEQ ID NO: 430 - protein, 12 aa, Homo sapiens
ASSVVVSGTPIR

SEQ ID NO: 431 - protein, 17 aa, Homo sapiens
ASTPNGYDNGIIWATWK

SEQ ID NO: 432 - protein, 19 aa, Homo sapiens
ASTPNGYDNGIIWATWKTR

SEQ ID NO: 433 - protein, 11 aa, Homo sapiens
ASVGQDSPEPR

SEQ ID NO: 434 - protein, 16 aa, Homo sapiens
ASVQLLVQDSLNPAVK

SEQ ID NO: 435 - protein, 11 aa, Homo sapiens
ASYAQQPAESR

SEQ ID NO: 436 - protein, 8 aa, Homo sapiens
ASYLDCIR

SEQ ID NO: 437 - protein, 10 aa, Homo sapiens
ASYPDITGEK

SEQ ID NO: 438 - protein, 13 aa, Homo sapiens
ATAPQTQHVSPMR

SEQ ID NO: 439 - protein, 11 aa, Homo sapiens
ATAQMLEVMFK

SEQ ID NO: 440 - protein, 17 aa, Homo sapiens
ATAQMLEVMFKGEIFHR

SEQ ID NO: 441 - protein, 10 aa, Homo sapiens
ATAVVDGAFK

SEQ ID NO: 442 - protein, 10 aa, Homo sapiens
ATEDEGSEQK

SEQ ID NO: 443 - protein, 17 aa, Homo sapiens
ATEDEGSEQKIPEATNR

SEQ ID NO: 444 - protein, 11 aa, Homo sapiens
ATEHLSTLSEK

SEQ ID NO: 445 - protein, 21 aa, Homo sapiens
ATFGCHDGYSLDGPEEIECTK

SEQ ID NO: 446 - protein, 26 aa, Homo sapiens
ATFMVGSYGPRPEEYEFLTPVEEAPK

SEQ ID NO: 447 - protein, 9 aa, Homo sapiens
ATFNPAQDK

SEQ ID NO: 448 - protein, 7 aa, Homo sapiens
ATGIPAR

SEQ ID NO: 449 - protein, 11 aa, Homo sapiens
ATGVLYDYVNK

SEQ ID NO: 450 - protein, 22 aa, Homo sapiens
ATGVLYDYVNKYHWEHTGLTLR

SEQ ID NO: 451 - protein, 9 aa, Homo sapiens
ATHGGLGLR

SEQ ID NO: 452 - protein, 15 aa, Homo sapiens
ATISHVSPDSLYLFR

SEQ ID NO: 453 - protein, 7 aa, Homo sapiens
ATITGYR

SEQ ID NO: 454 - protein, 21 aa, Homo sapiens
ATLDVDEAGTEAAAATSFAIK

SEQ ID NO: 455 - protein, 29 aa, Homo sapiens
ATLDVDEAGTEAAAATSFAIKFFSAQTNR

SEQ ID NO: 456 - protein, 14 aa, Homo sapiens
ATLGPAVRPLPWQR

SEQ ID NO: 457 - protein, 8 aa, Homo sapiens
ATLLDIYK

SEQ ID NO: 458 - protein, 10 aa, Homo sapiens
ATLPDADKER

SEQ ID NO: 459 - protein, 6 aa, Homo sapiens
ATLSCR

SEQ ID NO: 460 - protein, 6 aa, Homo sapiens
ATLSEK

SEQ ID NO: 461 - protein, 20 aa, Homo sapiens
ATLVCLISDFYPGAVTVAWK

SEQ ID NO: 462 - protein, 15 aa, Homo sapiens
ATLYALSHAVNNYHK

SEQ ID NO: 463 - protein, 19 aa, Homo sapiens
ATTVTGTPCQDWAAQEPHR

SEQ ID NO: 464 - protein, 14 aa, Homo sapiens
ATVAVYLESLQDTK

SEQ ID NO: 465 - protein, 9 aa, Homo sapiens
ATVLNYLPK

SEQ ID NO: 466 - protein, 12 aa, Homo sapiens
ATVLNYLPKCIR

SEQ ID NO: 467 - protein, 9 aa, Homo sapiens
ATVNPSAPR

SEQ ID NO: 468 - protein, 9 aa, Homo sapiens
ATVVESSEK

SEQ ID NO: 469 - protein, 9 aa, Homo sapiens
ATVVYQGER

SEQ ID NO: 470 - protein, 11 aa, Homo sapiens
ATWSGAVLAGR

SEQ ID NO: 471 - protein, 8 aa, Homo sapiens
ATYIQNYR

SEQ ID NO: 472 - protein, 11 aa, Homo sapiens
ATYTISITHPK

SEQ ID NO: 473 - protein, 10 aa, Homo sapiens
AVAEPGIQLK

SEQ ID NO: 474 - protein, 13 aa, Homo sapiens
AVAGNISDPGLQK

SEQ ID NO: 475 - protein, 9 aa, Homo sapiens
AVANSRPAK

SEQ ID NO: 476 - protein, 7 aa, Homo sapiens
AVASFLR

SEQ ID NO: 477 - protein, 7 aa, Homo sapiens
AVDAALK

SEQ ID NO: 478 - protein, 8 aa, Homo sapiens
AVDAALKK

SEQ ID NO: 479 - protein, 8 aa, Homo sapiens
AVDALVKK

SEQ ID NO: 480 - protein, 27 aa, Homo sapiens
AVDQSVLLMKPDAELSASSVYNLLPEK

SEQ ID NO: 481 - protein, 47 aa, Homo sapiens
AVDQSVLLMKPDAELSASSVYNLLPEKDLTGFPGPLNDQDDEDCINR

SEQ ID NO: 482 - protein, 27 aa, Homo sapiens
AVDQSVLLMKPEAELSVSSVYNLLTVK

SEQ ID NO: 483 - protein, 10 aa, Homo sapiens
AVDTWSWGER

SEQ ID NO: 484 - protein, 7 aa, Homo sapiens
AVEHINK

SEQ ID NO: 485 - protein, 7 aa, Homo sapiens
AVEIGVK

SEQ ID NO: 486 - protein, 7 aa, Homo sapiens
AVELGVK

SEQ ID NO: 487 - protein, 11 aa, Homo sapiens
AVEPQLQEEER

SEQ ID NO: 488 - protein, 7 aa, Homo sapiens
AVEVLPK

SEQ ID NO: 489 - protein, 11 aa, Homo sapiens
AVFPSIVGRPR

SEQ ID NO: 490 - protein, 8 aa, Homo sapiens
AVFVSEGK

SEQ ID NO: 491 - protein, 10 aa, Homo sapiens
AVGEEVWHSK

SEQ ID NO: 492 - protein, 9 aa, Homo sapiens
AVGLAGTFR

SEQ ID NO: 493 - protein, 6 aa, Homo sapiens
AVGNLR

SEQ ID NO: 494 - protein, 18 aa, Homo sapiens
AVGSGATFSHYYYMILSR

SEQ ID NO: 495 - protein, 11 aa, Homo sapiens
AVGYLITGYQR

SEQ ID NO: 496 - protein, 12 aa, Homo sapiens
AVHKAVLTIDEK

SEQ ID NO: 497 - protein, 12 aa, Homo sapiens
AVISPGFDVFAK

SEQ ID NO: 498 - protein, 10 aa, Homo sapiens
AVITVQRPGR

SEQ ID NO: 499 - protein, 19 aa, Homo sapiens
AVLDVFEEGTEASAATAVK

SEQ ID NO: 500 - protein, 30 aa, Homo sapiens
AVLDVFEEGTEASAATAVKITLLSALVETR

SEQ ID NO: 501 - protein, 8 aa, Homo sapiens
AVLHIGEK

SEQ ID NO: 502 - protein, 8 aa, Homo sapiens
AVLHVALR

SEQ ID NO: 503 - protein, 30 aa, Homo sapiens
AVLQLNEEGVDTAGSTGVTLNLTSKPIILR

SEQ ID NO: 504 - protein, 7 aa, Homo sapiens
AVLQNLK

SEQ ID NO: 505 - protein, 8 aa, Homo sapiens
AVLTIDEK

SEQ ID NO: 506 - protein, 30 aa, Homo sapiens
AVLTIDEKGTEAAGAMFLEAIPMSIPPEVK

SEQ ID NO: 507 - protein, 6 aa, Homo sapiens
AVLTQK

SEQ ID NO: 508 - protein, 7 aa, Homo sapiens
AVLYNYR

SEQ ID NO: 509 - protein, 12 aa, Homo sapiens
AVMDDFAAFVEK

SEQ ID NO: 510 - protein, 17 aa, Homo sapiens
AVMGAMKPGVWWPDMHR

SEQ ID NO: 511 - protein, 24 aa, Homo sapiens
AVPHPDSQPDTIDHDLLLLQLSEK

SEQ ID NO: 512 - protein, 9 aa, Homo sapiens
AVQADGQVK

SEQ ID NO: 513 - protein, 14 aa, Homo sapiens
AVQGFHTGVHQAGK

SEQ ID NO: 514 - protein, 7 aa, Homo sapiens
AVQLAEK

SEQ ID NO: 515 - protein, 11 aa, Homo sapiens
AVQPGETYTYK

SEQ ID NO: 516 - protein, 16 aa, Homo sapiens
AVQQPDGLAVLGIFLK

SEQ ID NO: 517 - protein, 7 aa, Homo sapiens
AVQSLDK

SEQ ID NO: 518 - protein, 8 aa, Homo sapiens
AVRPGYPK

SEQ ID NO: 519 - protein, 9 aa, Homo sapiens
AVSPLPYLR

SEQ ID NO: 520 - protein, 14 aa, Homo sapiens
AVSTGGGGHVQLLR

SEQ ID NO: 521 - protein, 14 aa, Homo sapiens
AVTEQGHELSNEER

SEQ ID NO: 522 - protein, 11 aa, Homo sapiens
AVVFLEPQWYR

SEQ ID NO: 523 - protein, 15 aa, Homo sapiens
AVVFLEPQWYSVLEK

SEQ ID NO: 524 - protein, 13 aa, Homo sapiens
AVVVHAGEDDLGR

SEQ ID NO: 525 - protein, 8 aa, Homo sapiens
AVYEAVLR

SEQ ID NO: 526 - protein, 18 aa, Homo sapiens
AVYTCNEGYQLLGEINYR

SEQ ID NO: 527 - protein, 6 aa, Homo sapiens
AWAVAR

SEQ ID NO: 528 - protein, 8 aa, Homo sapiens
AWEDTLDK

SEQ ID NO: 529 - protein, 7 aa, Homo sapiens
AWFLESK

SEQ ID NO: 530 - protein, 14 aa, Homo sapiens
AWGESTPLANKPGK

SEQ ID NO: 531 - protein, 7 aa, Homo sapiens
AWLMASR

SEQ ID NO: 532 - protein, 13 aa, Homo sapiens
AWLMSDKTDLEAK

SEQ ID NO: 533 - protein, 12 aa, Homo sapiens
AYFHLLNQIAPK

SEQ ID NO: 534 - protein, 20 aa, Homo sapiens
AYIFIDEAHITQALIWLSQR

SEQ ID NO: 535 - protein, 20 aa, Homo sapiens
AYISMHSYSQHIVFPYSYTR

SEQ ID NO: 536 - protein, 18 aa, Homo sapiens
AYKSELEEQLTPVAEETR

SEQ ID NO: 537 - protein, 12 aa, Homo sapiens
AYLEEECPATLR

SEQ ID NO: 538 - protein, 13 aa, Homo sapiens
AYLEEECPATLRK

SEQ ID NO: 539 - protein, 8 aa, Homo sapiens
AYNRPTLR

SEQ ID NO: 540 - protein, 7 aa, Homo sapiens
AYSDLSR

SEQ ID NO: 541 - protein, 10 aa, Homo sapiens
AYSEAHEISK

SEQ ID NO: 542 - protein, 10 aa, Homo sapiens
AYSHSVSLTR

SEQ ID NO: 543 - protein, 12 aa, Homo sapiens
AYSLFSYNTQGR

SEQ ID NO: 544 - protein, 20 aa, Homo sapiens
AYSLFSYNTQGRDNELLVYK

SEQ ID NO: 545 - protein, 15 aa, Homo sapiens
AYWDIMISNHQNSNR

SEQ ID NO: 546 - protein, 18 aa, Homo sapiens
AYYENSPQQVFSTEFEVK

SEQ ID NO: 547 - protein, 12 aa, Homo sapiens
AYYHLLEQVAPK

SEQ ID NO: 548 - protein, 6 aa, Homo sapiens
CASIQK

SEQ ID NO: 549 - protein, 6 aa, Homo sapiens
CASLQK

SEQ ID NO: 550 - protein, 13 aa, Homo sapiens
CDSSPDSAEDVRK

SEQ ID NO: 551 - protein, 6 aa, Homo sapiens
CDVDIR

SEQ ID NO: 552 - protein, 6 aa, Homo sapiens
CEPLEK

SEQ ID NO: 553 - protein, 6 aa, Homo sapiens
CEVQDR

SEQ ID NO: 554 - protein, 15 aa, Homo sapiens
CFDETRYEYLEGGDR

SEQ ID NO: 555 - protein, 14 aa, Homo sapiens
CFEGFGIDGPAIAK

SEQ ID NO: 556 - protein, 9 aa, Homo sapiens
CFLAFTQTK

SEQ ID NO: 557 - protein, 9 aa, Homo sapiens
CHAANPNGR

SEQ ID NO: 558 - protein, 18 aa, Homo sapiens
CHAGHLNGVYYQGGTYSK

SEQ ID NO: 559 - protein, 7 aa, Homo sapiens
CITAMAK

SEQ ID NO: 560 - protein, 9 aa, Homo sapiens
CLAPLEGAR

SEQ ID NO: 561 - protein, 10 aa, Homo sapiens
CLAYDFYPGK

SEQ ID NO: 562 - protein, 8 aa, Homo sapiens
CLEVEGHR

SEQ ID NO: 563 - protein, 9 aa, Homo sapiens
CLHPCVISR

SEQ ID NO: 564 - protein, 11 aa, Homo sapiens
CLPVTAPENGK

SEQ ID NO: 565 - protein, 12 aa, Homo sapiens
CLVEKGDVAFVK

SEQ ID NO: 566 - protein, 8 aa, Homo sapiens
CLVNLIEK

SEQ ID NO: 567 - protein, 7 aa, Homo sapiens
CNLLAEK

SEQ ID NO: 568 - protein, 10 aa, Homo sapiens
CNMGYEYSER

SEQ ID NO: 569 - protein, 12 aa, Homo sapiens
CPEDQDAEGFQK

SEQ ID NO: 570 - protein, 23 aa, Homo sapiens
CPFPSRPDNGFVNYPAKPTLYYK

SEQ ID NO: 571 - protein, 6 aa, Homo sapiens
CPLMVK

SEQ ID NO: 572 - protein, 13 aa, Homo sapiens
CQFFSYATQTFHK

SEQ ID NO: 573 - protein, 11 aa, Homo sapiens
CQSWSSMTPHR

SEQ ID NO: 574 - protein, 28 aa, Homo sapiens
CSPHLVLSALTSDNHGATYAFSGTHYWR

SEQ ID NO: 575 - protein, 8 aa, Homo sapiens
CTDAVGDR

SEQ ID NO: 576 - protein, 9 aa, Homo sapiens
CTDAVGDRR

SEQ ID NO: 577 - protein, 9 aa, Homo sapiens
CTEGFNVDK

SEQ ID NO: 578 - protein, 10 aa, Homo sapiens
CTEGFNVDKK

SEQ ID NO: 579 - protein, 11 aa, Homo sapiens
CTSTGWIPAPR

SEQ ID NO: 580 - protein, 13 aa, Homo sapiens
CVQSTKPSLMIQK

SEQ ID NO: 581 - protein, 16 aa, Homo sapiens
CYFPYLENGYNQNHGR

SEQ ID NO: 582 - protein, 7 aa, Homo sapiens
DADDLQK

SEQ ID NO: 583 - protein, 10 aa, Homo sapiens
DADPDTFFAK

SEQ ID NO: 584 - protein, 9 aa, Homo sapiens
DAEAWFNEK

SEQ ID NO: 585 - protein, 6 aa, Homo sapiens
DAEEIK

SEQ ID NO: 586 - protein, 13 aa, Homo sapiens
DAFDTLFDHAPDK

SEQ ID NO: 587 - protein, 19 aa, Homo sapiens
DAGEGLLAVQITDPEGKPK

SEQ ID NO: 588 - protein, 14 aa, Homo sapiens
DAHSVLLSHIFHGR

SEQ ID NO: 589 - protein, 9 aa, Homo sapiens
DALSASVVK

SEQ ID NO: 590 - protein, 19 aa, Homo sapiens
DAPDHQELNLDVSLQLPSR

SEQ ID NO: 591 - protein, 7 aa, Homo sapiens
DAPIVNK

SEQ ID NO: 592 - protein, 35 aa, Homo sapiens
DAPIVNKVVTPLSPPTNLHLEANPDTGVLTVSWER

SEQ ID NO: 593 - protein, 12 aa, Homo sapiens
DAQEVHCDEATK

SEQ ID NO: 594 - protein, 10 aa, Homo sapiens
DAQYAPGYDK

SEQ ID NO: 595 - protein, 21 aa, Homo sapiens
DASIVGFFDDSFSEAHSEFLK

SEQ ID NO: 596 - protein, 19 aa, Homo sapiens
DATNVGDEGGFAPNILENK

SEQ ID NO: 597 - protein, 16 aa, Homo sapiens
DAVEKPQEFTIVAFVK

SEQ ID NO: 598 - protein, 11 aa, Homo sapiens
DAVLMQFCANK

SEQ ID NO: 599 - protein, 5 aa, Homo sapiens
DAVLR

SEQ ID NO: 600 - protein, 21 aa, Homo sapiens
DCDDVLQTHPSGTQSGIFNIK

SEQ ID NO: 601 - protein, 6 aa, Homo sapiens
DCELPR

SEQ ID NO: 602 - protein, 15 aa, Homo sapiens
DCHLAQVPSHTVVAR

SEQ ID NO: 603 - protein, 8 aa, Homo sapiens
DCQDIANK

SEQ ID NO: 604 - protein, 10 aa, Homo sapiens
DDEEFIESNK

SEQ ID NO: 605 - protein, 8 aa, Homo sapiens
DDFTEFGK

SEQ ID NO: 606 - protein, 15 aa, Homo sapiens
DDGLFSGDPNWFPKK

SEQ ID NO: 607 - protein, 14 aa, Homo sapiens
DDILNGSHPVSFDK

SEQ ID NO: 608 - protein, 23 aa, Homo sapiens
DDKESVPISDTIIPAVPPPTDLR

SEQ ID NO: 609 - protein, 18 aa, Homo sapiens
DDKHEQDMVNGIMLSVEK

SEQ ID NO: 610 - protein, 11 aa, Homo sapiens
DDLYVSDAFHK

SEQ ID NO: 611 - protein, 8 aa, Homo sapiens
DDNPNLPR

SEQ ID NO: 612 - protein, 9 aa, Homo sapiens
DDWFMLGLR

SEQ ID NO: 613 - protein, 6 aa, Homo sapiens
DECFAR

SEQ ID NO: 614 - protein, 12 aa, Homo sapiens
DEELSCTVVELK

SEQ ID NO: 615 - protein, 16 aa, Homo sapiens
DEGTAFLVYGAPGFSK

SEQ ID NO: 616 - protein, 7 aa, Homo sapiens
DEIESVK

SEQ ID NO: 617 - protein, 12 aa, Homo sapiens
DEIPHNDIALLK

SEQ ID NO: 618 - protein, 6 aa, Homo sapiens
DENVLK

SEQ ID NO: 619 - protein, 10 aa, Homo sapiens
DFAEHLLIPR

SEQ ID NO: 620 - protein, 12 aa, Homo sapiens
DFALLSLQVPLK

SEQ ID NO: 621 - protein, 15 aa, Homo sapiens
DFALLSLQVPLKDAK

SEQ ID NO: 622 - protein, 10 aa, Homo sapiens
DFDFVPPVVR

SEQ ID NO: 623 - protein, 5 aa, Homo sapiens
DFDVK

SEQ ID NO: 624 - protein, 24 aa, Homo sapiens
DFGTHYITEAVLGGIYEYTLVMNK

SEQ ID NO: 625 - protein, 29 aa, Homo sapiens
DFGTHYITEAVLGGIYEYTLVMNKEAMER

SEQ ID NO: 626 - protein, 14 aa, Homo sapiens
DFHINLFQVLPWLK

SEQ ID NO: 627 - protein, 8 aa, Homo sapiens
DFHINLFR

SEQ ID NO: 628 - protein, 15 aa, Homo sapiens
DFISLGLQDGHLVFR

SEQ ID NO: 629 - protein, 12 aa, Homo sapiens
DFLGFYVVDSHR

SEQ ID NO: 630 - protein, 7 aa, Homo sapiens
DFLQSLK

SEQ ID NO: 631 - protein, 6 aa, Homo sapiens
DFPIAK

SEQ ID NO: 632 - protein, 16 aa, Homo sapiens
DFPLVDGHNDLPLVLR

SEQ ID NO: 633 - protein, 20 aa, Homo sapiens
DFQPVLHLVALNSPLSGGMR

SEQ ID NO: 634 - protein, 21 aa, Homo sapiens
DFSAEYEEDGKYEGLQEWEGK

SEQ ID NO: 635 - protein, 7 aa, Homo sapiens
DFSLWEK

SEQ ID NO: 636 - protein, 6 aa, Homo sapiens
DFTAYR

SEQ ID NO: 637 - protein, 10 aa, Homo sapiens
DFTCVHQALK

SEQ ID NO: 638 - protein, 8 aa, Homo sapiens
DFTFDLYR

SEQ ID NO: 639 - protein, 8 aa, Homo sapiens
DFVQPPTK

SEQ ID NO: 640 - protein, 10 aa, Homo sapiens
DGAGDVAFVK

SEQ ID NO: 641 - protein, 9 aa, Homo sapiens
DGDGTITTK

SEQ ID NO: 642 - protein, 13 aa, Homo sapiens
DGEQIEQEEDDEK

SEQ ID NO: 643 - protein, 15 aa, Homo sapiens
DGFVQDEGTMFPVGK

SEQ ID NO: 644 - protein, 16 aa, Homo sapiens
DGHFTLFAPTNEAFEK

SEQ ID NO: 645 - protein, 20 aa, Homo sapiens
DGHVILQLNSIPSSDFLCVR

SEQ ID NO: 646 - protein, 9 aa, Homo sapiens
DGNDHSLWR

SEQ ID NO: 647 - protein, 11 aa, Homo sapiens
DGNPFYFTDHR

SEQ ID NO: 648 - protein, 9 aa, Homo sapiens
DGNTLTYYR

SEQ ID NO: 649 - protein, 22 aa, Homo sapiens
DGREWEIVNQDNHYSPHFQEIR

SEQ ID NO: 650 - protein, 22 aa, Homo sapiens
DGRPEIQLHNHWAQLTVGAGPR

SEQ ID NO: 651 - protein, 20 aa, Homo sapiens
DGSPDVTTADIGANTPDATK

SEQ ID NO: 652 - protein, 9 aa, Homo sapiens
DGSTIPIAK

SEQ ID NO: 653 - protein, 13 aa, Homo sapiens
DGTFLNLVSDDRR

SEQ ID NO: 654 - protein, 16 aa, Homo sapiens
DGTHVVENVDATHIGK

SEQ ID NO: 655 - protein, 11 aa, Homo sapiens
DGTPPIDAHTR

SEQ ID NO: 656 - protein, 7 aa, Homo sapiens
DGTWSNK

SEQ ID NO: 657 - protein, 28 aa, Homo sapiens
DGWHSWPIAHQWPQGPSAVDAAFSWEEK

SEQ ID NO: 658 - protein, 11 aa, Homo sapiens
DGWSAQPTCIK

SEQ ID NO: 659 - protein, 9 aa, Homo sapiens
DGYLFQLLR

SEQ ID NO: 660 - protein, 6 aa, Homo sapiens
DGYVLR

SEQ ID NO: 661 - protein, 9 aa, Homo sapiens
DHAVDLIQK

SEQ ID NO: 662 - protein, 13 aa, Homo sapiens
DHAVDLIQKGYMR

SEQ ID NO: 663 - protein, 14 aa, Homo sapiens
DHEELSLVASEAVR

SEQ ID NO: 664 - protein, 9 aa, Homo sapiens
DHENELLNK

SEQ ID NO: 665 - protein, 20 aa, Homo sapiens
DHHHPHKPHEHGPPPPPDER

SEQ ID NO: 666 - protein, 14 aa, Homo sapiens
DHLGFQVTWPDESK

SEQ ID NO: 667 - protein, 14 aa, Homo sapiens
DHSGQVFSVVSNGK

SEQ ID NO: 668 - protein, 10 aa, Homo sapiens
DIAANEENRK

SEQ ID NO: 669 - protein, 6 aa, Homo sapiens
DIAILK

SEQ ID NO: 670 - protein, 6 aa, Homo sapiens
DIALLK

SEQ ID NO: 671 - protein, 6 aa, Homo sapiens
DIALMK

SEQ ID NO: 672 - protein, 12 aa, Homo sapiens
DIAPTLTLYVGK

SEQ ID NO: 673 - protein, 13 aa, Homo sapiens
DIAPTLTLYVGKK

SEQ ID NO: 674 - protein, 14 aa, Homo sapiens
DIASGLIGPLIICK

SEQ ID NO: 675 - protein, 15 aa, Homo sapiens
DIASGLIGPLIICKK

SEQ ID NO: 676 - protein, 9 aa, Homo sapiens
DIAWTEDSK

SEQ ID NO: 677 - protein, 6 aa, Homo sapiens
DIDSEK

SEQ ID NO: 678 - protein, 12 aa, Homo sapiens
DIEAQLQHAGLR

SEQ ID NO: 679 - protein, 12 aa, Homo sapiens
DIEHLTSLDFFR

SEQ ID NO: 680 - protein, 29 aa, Homo sapiens
DIENQYETQITQIEHEVSSSGQEVQSSAK

SEQ ID NO: 681 - protein, 7 aa, Homo sapiens
DIEQIVK

SEQ ID NO: 682 - protein, 11 aa, Homo sapiens
DIFTGLIGPMK

SEQ ID NO: 683 - protein, 5 aa, Homo sapiens
DIIFK

SEQ ID NO: 684 - protein, 7 aa, Homo sapiens
DIILTVK

SEQ ID NO: 685 - protein, 22 aa, Homo sapiens
DILATNGVIHYIDELLIPDSAK

SEQ ID NO: 686 - protein, 5 aa, Homo sapiens
DILDR

SEQ ID NO: 687 - protein, 6 aa, Homo sapiens
DILLEK

SEQ ID NO: 688 - protein, 8 aa, Homo sapiens
DIMAEIYK

SEQ ID NO: 689 - protein, 5 aa, Homo sapiens
DIMEK

SEQ ID NO: 690 - protein, 10 aa, Homo sapiens
DINTFIHGNK

SEQ ID NO: 691 - protein, 11 aa, Homo sapiens
DINTFIHGNKR

SEQ ID NO: 692 - protein, 10 aa, Homo sapiens
DINYVNPVIK

SEQ ID NO: 693 - protein, 19 aa, Homo sapiens
DIPQPHAEPWAFSLDLGLK

SEQ ID NO: 694 - protein, 19 aa, Homo sapiens
DIPTNSPELEETLTHTITK

SEQ ID NO: 695 - protein, 6 aa, Homo sapiens
DIQDLK

SEQ ID NO: 696 - protein, 5 aa, Homo sapiens
DIQLR

SEQ ID NO: 697 - protein, 8 aa, Homo sapiens
DIREEAEK

SEQ ID NO: 698 - protein, 9 aa, Homo sapiens
DISEVVTPR

SEQ ID NO: 699 - protein, 21 aa, Homo sapiens
DITDTLVAVTISEGAHHLDLR

SEQ ID NO: 700 - protein, 18 aa, Homo sapiens
DIVEYYNDSNGSHVLQGR

SEQ ID NO: 701 - protein, 8 aa, Homo sapiens
DKCEPLEK

SEQ ID NO: 702 - protein, 20 aa, Homo sapiens
DKDQEVLLQTFLDDASPGDK

SEQ ID NO: 703 - protein, 11 aa, Homo sapiens
DKEPLTAYNYK

SEQ ID NO: 704 - protein, 10 aa, Homo sapiens
DKIGVELTGR

SEQ ID NO: 705 - protein, 6 aa, Homo sapiens
DKPLVK

SEQ ID NO: 706 - protein, 6 aa, Homo sapiens
DLALLK

SEQ ID NO: 707 - protein, 11 aa, Homo sapiens
DLATVYVDVLK

SEQ ID NO: 708 - protein, 6 aa, Homo sapiens
DLDDTK

SEQ ID NO: 709 - protein, 17 aa, Homo sapiens
DLDSQTMMVLVNYIFFK

SEQ ID NO: 710 - protein, 11 aa, Homo sapiens
DLEAHIDSANK

SEQ ID NO: 711 - protein, 6 aa, Homo sapiens
DLEEVK

SEQ ID NO: 712 - protein, 18 aa, Homo sapiens
DLEIEVVLFHPNYNINGK

SEQ ID NO: 713 - protein, 19 aa, Homo sapiens
DLEIEVVLFHPNYNINGKK

SEQ ID NO: 714 - protein, 17 aa, Homo sapiens
DLETQVIQLNEQVHSLK

SEQ ID NO: 715 - protein, 12 aa, Homo sapiens
DLFHCVSFTLPR

SEQ ID NO: 716 - protein, 15 aa, Homo sapiens
DLFIGDVIHNAGPHR

SEQ ID NO: 717 - protein, 8 aa, Homo sapiens
DLGEENFK

SEQ ID NO: 718 - protein, 7 aa, Homo sapiens
DLGQCDR

SEQ ID NO: 719 - protein, 14 aa, Homo sapiens
DLHFLEELQLGHNR

SEQ ID NO: 720 - protein, 10 aa, Homo sapiens
DLHLSDVFLK

SEQ ID NO: 721 - protein, 10 aa, Homo sapiens
DLHPNTDPFK

SEQ ID NO: 722 - protein, 15 aa, Homo sapiens
DLHPNTDPFKFEIHK

SEQ ID NO: 723 - protein, 5 aa, Homo sapiens
DLIFK

SEQ ID NO: 724 - protein, 6 aa, Homo sapiens
DLISPR

SEQ ID NO: 725 - protein, 8 aa, Homo sapiens
DLKPAIVK

SEQ ID NO: 726 - protein, 11 aa, Homo sapiens
DLKVEDIPLAR

SEQ ID NO: 727 - protein, 5 aa, Homo sapiens
DLLDR

SEQ ID NO: 728 - protein, 5 aa, Homo sapiens
DLLFK

SEQ ID NO: 729 - protein, 13 aa, Homo sapiens
DLLFKDSAHGFLK

SEQ ID NO: 730 - protein, 13 aa, Homo sapiens
DLLFRDDTVCLAK

SEQ ID NO: 731 - protein, 8 aa, Homo sapiens
DLLGIYEK

SEQ ID NO: 732 - protein, 6 aa, Homo sapiens
DLLLEK

SEQ ID NO: 733 - protein, 10 aa, Homo sapiens
DLLLPQPDLR

SEQ ID NO: 734 - protein, 7 aa, Homo sapiens
DLLLTVK

SEQ ID NO: 735 - protein, 9 aa, Homo sapiens
DLLNNHILK

SEQ ID NO: 736 - protein, 6 aa, Homo sapiens
DLLPSR

SEQ ID NO: 737 - protein, 8 aa, Homo sapiens
DLLPSRDR

SEQ ID NO: 738 - protein, 11 aa, Homo sapiens
DLLQTVEDQYK

SEQ ID NO: 739 - protein, 7 aa, Homo sapiens
DLLYIGK

SEQ ID NO: 740 - protein, 9 aa, Homo sapiens
DLLYIGKDR

SEQ ID NO: 741 - protein, 5 aa, Homo sapiens
DLMEK

SEQ ID NO: 742 - protein, 6 aa, Homo sapiens
DLQEVK

SEQ ID NO: 743 - protein, 8 aa, Homo sapiens
DLQFSEIR

SEQ ID NO: 744 - protein, 11 aa, Homo sapiens
DLQFVEVTDVK

SEQ ID NO: 745 - protein, 12 aa, Homo sapiens
DLQGRDEQSEEK

SEQ ID NO: 746 - protein, 7 aa, Homo sapiens
DLQNFLK

SEQ ID NO: 747 - protein, 8 aa, Homo sapiens
DLQNFLKK

SEQ ID NO: 748 - protein, 15 aa, Homo sapiens
DLQSLEDILHQVENK

SEQ ID NO: 749 - protein, 20 aa, Homo sapiens
DLQSLEDILHQVENKTSEVK

SEQ ID NO: 750 - protein, 7 aa, Homo sapiens
DLQYVEK

SEQ ID NO: 751 - protein, 7 aa, Homo sapiens
DLSDAGK

SEQ ID NO: 752 - protein, 10 aa, Homo sapiens
DLSLLQIQMR

SEQ ID NO: 753 - protein, 8 aa, Homo sapiens
DLTDYLMK

SEQ ID NO: 754 - protein, 39 aa, Homo sapiens
DLTGFPGPLNDQDDEDCINRHNVYINGITYTPVSSTNEK

SEQ ID NO: 755 - protein, 6 aa, Homo sapiens
DLTIEK

SEQ ID NO: 756 - protein, 32 aa, Homo sapiens
DLTSLGHNENQQGSFSSQGGSSFSVPIFYSSK

SEQ ID NO: 757 - protein, 10 aa, Homo sapiens
DLVFSTWDHK

SEQ ID NO: 758 - protein, 5 aa, Homo sapiens
DLWQK

SEQ ID NO: 759 - protein, 13 aa, Homo sapiens
DLWVNIDQMEKDK

SEQ ID NO: 760 - protein, 5 aa, Homo sapiens
DLYSK

SEQ ID NO: 761 - protein, 16 aa, Homo sapiens
DMALTAFVLISLQEAK

SEQ ID NO: 762 - protein, 13 aa, Homo sapiens
DMPASEDLQDLQK

SEQ ID NO: 763 - protein, 6 aa, Homo sapiens
DMQLGR

SEQ ID NO: 764 - protein, 15 aa, Homo sapiens
DMTEVISSLENANYK

SEQ ID NO: 765 - protein, 6 aa, Homo sapiens
DMVEYK

SEQ ID NO: 766 - protein, 8 aa, Homo sapiens
DMVEYKDR

SEQ ID NO: 767 - protein, 12 aa, Homo sapiens
DMYSFLEDMGLK

SEQ ID NO: 768 - protein, 11 aa, Homo sapiens
DNDGWLTSDPR

SEQ ID NO: 769 - protein, 12 aa, Homo sapiens
DNDGWLTSDPRK

SEQ ID NO: 770 - protein, 10 aa, Homo sapiens
DNEDFQESNR

SEQ ID NO: 771 - protein, 12 aa, Homo sapiens
DNEETGFGSGTR

SEQ ID NO: 772 - protein, 8 aa, Homo sapiens
DNELLVYK

SEQ ID NO: 773 - protein, 10 aa, Homo sapiens
DNELLVYKER

SEQ ID NO: 774 - protein, 15 aa, Homo sapiens
DNENVVNEYSSELEK

SEQ ID NO: 775 - protein, 33 aa, Homo sapiens
DNENVVNEYSSELEKHQLYIDETVNSNIPTNLR

SEQ ID NO: 776 - protein, 8 aa, Homo sapiens
DNEQHVFK

SEQ ID NO: 777 - protein, 6 aa, Homo sapiens
DNGCFR

SEQ ID NO: 778 - protein, 12 aa, Homo sapiens
DNIQGITKPAIR

SEQ ID NO: 779 - protein, 13 aa, Homo sapiens
DNSALDPIIHGLK

SEQ ID NO: 780 - protein, 15 aa, Homo sapiens
DNSKNTLYLQMNSLR

SEQ ID NO: 781 - protein, 13 aa, Homo sapiens
DNSVHWERPQKPK

SEQ ID NO: 782 - protein, 11 aa, Homo sapiens
DNTINLIHTFR

SEQ ID NO: 783 - protein, 6 aa, Homo sapiens
DNTYNR

SEQ ID NO: 784 - protein, 14 aa, Homo sapiens
DNVEMDTFQIECLK

SEQ ID NO: 785 - protein, 9 aa, Homo sapiens
DNVFDGLVR

SEQ ID NO: 786 - protein, 20 aa, Homo sapiens
DPAGHFHQVWYDNPQSISLK

SEQ ID NO: 787 - protein, 13 aa, Homo sapiens
DPDASKPEDWDER

SEQ ID NO: 788 - protein, 22 aa, Homo sapiens
DPDQTDGLGLSYLSSHIANVER

SEQ ID NO: 789 - protein, 19 aa, Homo sapiens
DPEIHLSGPLEAGKPITVK

SEQ ID NO: 790 - protein, 11 aa, Homo sapiens
DPNGLPPEAQK

SEQ ID NO: 791 - protein, 14 aa, Homo sapiens
DPNHFRPAGLPEKY

SEQ ID NO: 792 - protein, 13 aa, Homo sapiens
DPPSWSVLAGHSR

SEQ ID NO: 793 - protein, 6 aa, Homo sapiens
DPQFQK

SEQ ID NO: 794 - protein, 12 aa, Homo sapiens
DPTFIPAPIQAK

SEQ ID NO: 795 - protein, 11 aa, Homo sapiens
DPYDQSPMTPR

SEQ ID NO: 796 - protein, 10 aa, Homo sapiens
DQALTEEHAR

SEQ ID NO: 797 - protein, 18 aa, Homo sapiens
DQEVLLQTFLDDASPGDK

SEQ ID NO: 798 - protein, 19 aa, Homo sapiens
DQEVLLQTFLDDASPGDKR

SEQ ID NO: 799 - protein, 29 aa, Homo sapiens
DQFNLIVFSTEATQWRPSLVPASAENVNK

SEQ ID NO: 800 - protein, 9 aa, Homo sapiens
DQLIYNLLK

SEQ ID NO: 801 - protein, 17 aa, Homo sapiens
DQLIYNLLKEEQTPQNK

SEQ ID NO: 802 - protein, 11 aa, Homo sapiens
DQLTCNKFDLK

SEQ ID NO: 803 - protein, 25 aa, Homo sapiens
DQNQQCSYIPGSVDNYQTARADVEK

SEQ ID NO: 804 - protein, 11 aa, Homo sapiens
DQPRPAFSAIR

SEQ ID NO: 805 - protein, 20 aa, Homo sapiens
DQTIRFDHVITNMNNNYEPR

SEQ ID NO: 806 - protein, 8 aa, Homo sapiens
DQVETALK

SEQ ID NO: 807 - protein, 42 aa, Homo sapiens
DQVNTFDNIFIAPVGISTAMGMISLGLKGETHEQVHSILHFK

SEQ ID NO: 808 - protein, 11 aa, Homo sapiens
DRDGNTLTYYR

SEQ ID NO: 809 - protein, 17 aa, Homo sapiens
DRDVTFSPATIENELIK

SEQ ID NO: 810 - protein, 9 aa, Homo sapiens
DRQHLPLIK

SEQ ID NO: 811 - protein, 30 aa, Homo sapiens
DRSPCYGYQWVSEEHEEAHHTAYLVFSPSK

SEQ ID NO: 812 - protein, 11 aa, Homo sapiens
DRVVEESELAR

SEQ ID NO: 813 - protein, 8 aa, Homo sapiens
DSAHGFLK

SEQ ID NO: 814 - protein, 11 aa, Homo sapiens
DSCTLPASAEK

SEQ ID NO: 815 - protein, 10 aa, Homo sapiens
DSCVGSLVVK

SEQ ID NO: 816 - protein, 11 aa, Homo sapiens
DSDLLSPSDFK

SEQ ID NO: 817 - protein, 15 aa, Homo sapiens
DSDWPFCSDEDWNYK

SEQ ID NO: 818 - protein, 8 aa, Homo sapiens
DSEITFIK

SEQ ID NO: 819 - protein, 9 aa, Homo sapiens
DSEITFIKK

SEQ ID NO: 820 - protein, 7 aa, Homo sapiens
DSFDIIK

SEQ ID NO: 821 - protein, 8 aa, Homo sapiens
DSFDIIKR

SEQ ID NO: 822 - protein, 19 aa, Homo sapiens
DSFHLDEQFTVPVEMMQAR

SEQ ID NO: 823 - protein, 7 aa, Homo sapiens
DSFSNEK

SEQ ID NO: 824 - protein, 10 aa, Homo sapiens
DSGFQMNQLR

SEQ ID NO: 825 - protein, 17 aa, Homo sapiens
DSGRDYVSQFEGSALGK

SEQ ID NO: 826 - protein, 14 aa, Homo sapiens
DSHSLTTNIMEILR

SEQ ID NO: 827 - protein, 5 aa, Homo sapiens
DSILK

SEQ ID NO: 828 - protein, 5 aa, Homo sapiens
DSISR

SEQ ID NO: 829 - protein, 17 aa, Homo sapiens
DSITTWEILAVSMSDKK

SEQ ID NO: 830 - protein, 7 aa, Homo sapiens
DSLDKEK

SEQ ID NO: 831 - protein, 6 aa, Homo sapiens
DSLEFR

SEQ ID NO: 832 - protein, 15 aa, Homo sapiens
DSLEFREIGELYLPK

SEQ ID NO: 833 - protein, 5 aa, Homo sapiens
DSLIK

SEQ ID NO: 834 - protein, 5 aa, Homo sapiens
DSLLK

SEQ ID NO: 835 - protein, 11 aa, Homo sapiens
DSLSINATNIK

SEQ ID NO: 836 - protein, 5 aa, Homo sapiens
DSLSR

SEQ ID NO: 837 - protein, 8 aa, Homo sapiens
DSLVLLGR

SEQ ID NO: 838 - protein, 12 aa, Homo sapiens
DSPSVWAAVPGK

SEQ ID NO: 839 - protein, 14 aa, Homo sapiens
DSPVLIDFFEDTER

SEQ ID NO: 840 - protein, 15 aa, Homo sapiens
DSQEEEKTEALTSAK

SEQ ID NO: 841 - protein, 6 aa, Homo sapiens
DSSFIR

SEQ ID NO: 842 - protein, 12 aa, Homo sapiens
DSSTWLTAFVLK

SEQ ID NO: 843 - protein, 11 aa, Homo sapiens
DSSVPNTGTAR

SEQ ID NO: 844 - protein, 7 aa, Homo sapiens
DSVSLRK

SEQ ID NO: 845 - protein, 9 aa, Homo sapiens
DSVTETLPR

SEQ ID NO: 846 - protein, 9 aa, Homo sapiens
DSVTGTLPK

SEQ ID NO: 847 - protein, 6 aa, Homo sapiens
DSVTLK

SEQ ID NO: 848 - protein, 6 aa, Homo sapiens
DSWLDK

SEQ ID NO: 849 - protein, 9 aa, Homo sapiens
DSYDLHDLK

SEQ ID NO: 850 - protein, 11 aa, Homo sapiens
DSYVGDEAQSK

SEQ ID NO: 851 - protein, 38 aa, Homo sapiens
DTANLFPQTSLTLHMWPDTEGTFNVECLTTDHYTGGMK

SEQ ID NO: 852 - protein, 7 aa, Homo sapiens
DTDGDGR

SEQ ID NO: 853 - protein, 32 aa, Homo sapiens
DTDRFSSHVGGTLGQFYQEVLWGSPAASDDGR

SEQ ID NO: 854 - protein, 12 aa, Homo sapiens
DTDTGALLFIGK

SEQ ID NO: 855 - protein, 16 aa, Homo sapiens
DTEEEDFHVDQVTTVK

SEQ ID NO: 856 - protein, 21 aa, Homo sapiens
DTEEEDFHVDQVTTVKVPMMK

SEQ ID NO: 857 - protein, 15 aa, Homo sapiens
DTGENLETPSSFTIK

SEQ ID NO: 858 - protein, 6 aa, Homo sapiens
DTIVFK

SEQ ID NO: 859 - protein, 22 aa, Homo sapiens
DTLTSRPAQGVVTTLENVSPPR

SEQ ID NO: 860 - protein, 23 aa, Homo sapiens
DTLTSRPAQGVVTTLENVSPPRR

SEQ ID NO: 861 - protein, 12 aa, Homo sapiens
DTMVEDLVVLVR

SEQ ID NO: 862 - protein, 8 aa, Homo sapiens
DTPFSQIK

SEQ ID NO: 863 - protein, 17 aa, Homo sapiens
DTPFSQIKEIIIHQNYK

SEQ ID NO: 864 - protein, 13 aa, Homo sapiens
DTVFALVNYIFFK

SEQ ID NO: 865 - protein, 16 aa, Homo sapiens
DTVIKPLLVEPEGLEK

SEQ ID NO: 866 - protein, 11 aa, Homo sapiens
DTVQIHDITGK

SEQ ID NO: 867 - protein, 19 aa, Homo sapiens
DTVQIHDITGKDCQDIANK

SEQ ID NO: 868 - protein, 10 aa, Homo sapiens
DVAAEAGVSK

SEQ ID NO: 869 - protein, 11 aa, Homo sapiens
DVAVSYYHFHR

SEQ ID NO: 870 - protein, 9 aa, Homo sapiens
DVCDPGNTK

SEQ ID NO: 871 - protein, 9 aa, Homo sapiens
DVDGAYMTK

SEQ ID NO: 872 - protein, 15 aa, Homo sapiens
DVDIIDHHDNTYTVK

SEQ ID NO: 873 - protein, 7 aa, Homo sapiens
DVDNALR

SEQ ID NO: 874 - protein, 9 aa, Homo sapiens
DVDNAYMIK

SEQ ID NO: 875 - protein, 13 aa, Homo sapiens
DVFLGMFLYEYAR

SEQ ID NO: 876 - protein, 12 aa, Homo sapiens
DVHEGQPLLNVK

SEQ ID NO: 877 - protein, 5 aa, Homo sapiens
DVIVR

SEQ ID NO: 878 - protein, 11 aa, Homo sapiens
DVLLQVDDERR

SEQ ID NO: 879 - protein, 13 aa, Homo sapiens
DVLMVLVNYIYFK

SEQ ID NO: 880 - protein, 5 aa, Homo sapiens
DVLVR

SEQ ID NO: 881 - protein, 7 aa, Homo sapiens
DVVLFEK

SEQ ID NO: 882 - protein, 13 aa, Homo sapiens
DVVLTTTFVDDIK

SEQ ID NO: 883 - protein, 15 aa, Homo sapiens
DVWGIEGPIDAAFTR

SEQ ID NO: 884 - protein, 23 aa, Homo sapiens
DVYLLHESYDDVQQSFFLAETLK

SEQ ID NO: 885 - protein, 16 aa, Homo sapiens
DWHGVPGQVDAAMAGR

SEQ ID NO: 886 - protein, 7 aa, Homo sapiens
DYEDQQK

SEQ ID NO: 887 - protein, 12 aa, Homo sapiens
DYENGFGNFVQK

SEQ ID NO: 888 - protein, 11 aa, Homo sapiens
DYETATLSEIK

SEQ ID NO: 889 - protein, 8 aa, Homo sapiens
DYFIATCK

SEQ ID NO: 890 - protein, 9 aa, Homo sapiens
DYFMPCPGR

SEQ ID NO: 891 - protein, 7 aa, Homo sapiens
DYIEFNK

SEQ ID NO: 892 - protein, 10 aa, Homo sapiens
DYIFGNYIER

SEQ ID NO: 893 - protein, 21 aa, Homo sapiens
DYLIEDGTVHLVYGILEEPFR

SEQ ID NO: 894 - protein, 5 aa, Homo sapiens
DYLVK

SEQ ID NO: 895 - protein, 20 aa, Homo sapiens
DYNLNDILLQLGIEEAFTSK

SEQ ID NO: 896 - protein, 30 aa, Homo sapiens
DYNLNDILLQLGIEEAFTSKADLSGITGAR

SEQ ID NO: 897 - protein, 9 aa, Homo sapiens
DYNVTANSK

SEQ ID NO: 898 - protein, 9 aa, Homo sapiens
DYQELMNTK

SEQ ID NO: 899 - protein, 22 aa, Homo sapiens
DYQEMIENYVHWNEDIGEWQLK

SEQ ID NO: 900 - protein, 9 aa, Homo sapiens
DYSGQGVVK

SEQ ID NO: 901 - protein, 9 aa, Homo sapiens
DYSVTANSK

SEQ ID NO: 902 - protein, 5 aa, Homo sapiens
DYVEK

SEQ ID NO: 903 - protein, 13 aa, Homo sapiens
DYVSQFEGSALGK

SEQ ID NO: 904 - protein, 7 aa, Homo sapiens
DYWSTVK

SEQ ID NO: 905 - protein, 9 aa, Homo sapiens
DYWSTVKDK

SEQ ID NO: 906 - protein, 13 aa, Homo sapiens
EAAYHPEVAPDVR

SEQ ID NO: 907 - protein, 17 aa, Homo sapiens
EADESLNFEEQILEAAK

SEQ ID NO: 908 - protein, 16 aa, Homo sapiens
EAEAAIYHLQLFEELR

SEQ ID NO: 909 - protein, 17 aa, Homo sapiens
EAEAAIYHLQLFEELRR

SEQ ID NO: 910 - protein, 9 aa, Homo sapiens
EAEGPLPIK

SEQ ID NO: 911 - protein, 6 aa, Homo sapiens
EAEIIK

SEQ ID NO: 912 - protein, 17 aa, Homo sapiens
EAENFHEEDDVDVRPAR

SEQ ID NO: 913 - protein, 9 aa, Homo sapiens
EAEPLVDIR

SEQ ID NO: 914 - protein, 7 aa, Homo sapiens
EAEVLLK

SEQ ID NO: 915 - protein, 8 aa, Homo sapiens
EAFAAVSK

SEQ ID NO: 916 - protein, 15 aa, Homo sapiens
EAFAAVSKIAWHVIR

SEQ ID NO: 917 - protein, 7 aa, Homo sapiens
EAFEISK

SEQ ID NO: 918 - protein, 8 aa, Homo sapiens
EAFELFDR

SEQ ID NO: 919 - protein, 8 aa, Homo sapiens
EAFQLFDR

SEQ ID NO: 920 - protein, 8 aa, Homo sapiens
EAFSLFDK

SEQ ID NO: 921 - protein, 16 aa, Homo sapiens
EAGAGGLAIAVEGPSK

SEQ ID NO: 922 - protein, 16 aa, Homo sapiens
EAGIPEFYDYDVALIK

SEQ ID NO: 923 - protein, 7 aa, Homo sapiens
EAGLDLR

SEQ ID NO: 924 - protein, 18 aa, Homo sapiens
EAGQFGHDIHHTAGQAGK

SEQ ID NO: 925 - protein, 19 aa, Homo sapiens
EAGSQKDENLALYVENQFR

SEQ ID NO: 926 - protein, 5 aa, Homo sapiens
EAIIK

SEQ ID NO: 927 - protein, 5 aa, Homo sapiens
EAIIR

SEQ ID NO: 928 - protein, 5 aa, Homo sapiens
EAILK

SEQ ID NO: 929 - protein, 5 aa, Homo sapiens
EAILR

SEQ ID NO: 930 - protein, 5 aa, Homo sapiens
EAIVK

SEQ ID NO: 931 - protein, 10 aa, Homo sapiens
EALAIVFFGR

SEQ ID NO: 932 - protein, 5 aa, Homo sapiens
EALIK

SEQ ID NO: 933 - protein, 15 aa, Homo sapiens
EALIQFLEQVHQGIK

SEQ ID NO: 934 - protein, 5 aa, Homo sapiens
EALIR

SEQ ID NO: 935 - protein, 15 aa, Homo sapiens
EALKESQLPTVMDFR

SEQ ID NO: 936 - protein, 8 aa, Homo sapiens
EALKLEEK

SEQ ID NO: 937 - protein, 5 aa, Homo sapiens
EALLK

SEQ ID NO: 938 - protein, 5 aa, Homo sapiens
EALLR

SEQ ID NO: 939 - protein, 11 aa, Homo sapiens
EALQGVGDMGR

SEQ ID NO: 940 - protein, 6 aa, Homo sapiens
EALQIK

SEQ ID NO: 941 - protein, 12 aa, Homo sapiens
EALQIKYNFSFR

SEQ ID NO: 942 - protein, 5 aa, Homo sapiens
EALVK

SEQ ID NO: 943 - protein, 11 aa, Homo sapiens
EALVPLVADHK

SEQ ID NO: 944 - protein, 9 aa, Homo sapiens
EANYIGSDK

SEQ ID NO: 945 - protein, 9 aa, Homo sapiens
EAPDLVLQR

SEQ ID NO: 946 - protein, 12 aa, Homo sapiens
EAPKVVEEQESR

SEQ ID NO: 947 - protein, 6 aa, Homo sapiens
EAPLQK

SEQ ID NO: 948 - protein, 7 aa, Homo sapiens
EAQEVFK

SEQ ID NO: 949 - protein, 10 aa, Homo sapiens
EAQLPVIENK

SEQ ID NO: 950 - protein, 22 aa, Homo sapiens
EASMEGIVTIVGLKPETTYAVR

SEQ ID NO: 951 - protein, 11 aa, Homo sapiens
EATDVIIIHSK

SEQ ID NO: 952 - protein, 14 aa, Homo sapiens
EATEAAKCNLLAEK

SEQ ID NO: 953 - protein, 14 aa, Homo sapiens
EATIPGHLNSYTIK

SEQ ID NO: 954 - protein, 14 aa, Homo sapiens
EATNPPVIQEEKPK

SEQ ID NO: 955 - protein, 8 aa, Homo sapiens
EAVEHLQK

SEQ ID NO: 956 - protein, 18 aa, Homo sapiens
EAVKEDNLVHWERPQRPK

SEQ ID NO: 957 - protein, 27 aa, Homo sapiens
EAVLIQAGEYMGQLLEQASLHFFVTAR

SEQ ID NO: 958 - protein, 23 aa, Homo sapiens
EAVMDINKPGPLFKPENGLLETK

SEQ ID NO: 959 - protein, 7 aa, Homo sapiens
EAYQSMK

SEQ ID NO: 960 - protein, 7 aa, Homo sapiens
ECEEIIR

SEQ ID NO: 961 - protein, 8 aa, Homo sapiens
ECEEIIRK

SEQ ID NO: 962 - protein, 6 aa, Homo sapiens
ECELPK

SEQ ID NO: 963 - protein, 9 aa, Homo sapiens
ECNNPAPQR

SEQ ID NO: 964 - protein, 12 aa, Homo sapiens
ECNNPPPSGGGR

SEQ ID NO: 965 - protein, 9 aa, Homo sapiens
EDAANNYAR

SEQ ID NO: 966 - protein, 9 aa, Homo sapiens
EDAVSAAFK

SEQ ID NO: 967 - protein, 10 aa, Homo sapiens
EDEDFQESNK

SEQ ID NO: 968 - protein, 5 aa, Homo sapiens
EDFDK

SEQ ID NO: 969 - protein, 13 aa, Homo sapiens
EDFTSLSLVLYSR

SEQ ID NO: 970 - protein, 10 aa, Homo sapiens
EDGGGWWYNR

SEQ ID NO: 971 - protein, 9 aa, Homo sapiens
EDIFMETLK

SEQ ID NO: 972 - protein, 9 aa, Homo sapiens
EDKYEEEIK

SEQ ID NO: 973 - protein, 5 aa, Homo sapiens
EDLCR

SEQ ID NO: 974 - protein, 17 aa, Homo sapiens
EDLIWELLNQAQEHFGK

SEQ ID NO: 975 - protein, 19 aa, Homo sapiens
EDLIWELLNQAQEHFGKDK

SEQ ID NO: 976 - protein, 8 aa, Homo sapiens
EDLKDDQK

SEQ ID NO: 977 - protein, 5 aa, Homo sapiens
EDLPK

SEQ ID NO: 978 - protein, 12 aa, Homo sapiens
EDLRLPEGDLGK

SEQ ID NO: 979 - protein, 14 aa, Homo sapiens
EDNLVHWERPQRPK

SEQ ID NO: 980 - protein, 24 aa, Homo sapiens
EDPAYLHYYDPAGAEDPLGAIHLR

SEQ ID NO: 981 - protein, 14 aa, Homo sapiens
EDPQTFYYAVAVVK

SEQ ID NO: 982 - protein, 15 aa, Homo sapiens
EDPQTFYYAVAVVKK

SEQ ID NO: 983 - protein, 10 aa, Homo sapiens
EDQYHYLLDR

SEQ ID NO: 984 - protein, 8 aa, Homo sapiens
EDRVPHSR

SEQ ID NO: 985 - protein, 9 aa, Homo sapiens
EDRYEEEIK

SEQ ID NO: 986 - protein, 12 aa, Homo sapiens
EDTPNSVWEPAK

SEQ ID NO: 987 - protein, 18 aa, Homo sapiens
EDTSFFGVQEIIIHDQYK

SEQ ID NO: 988 - protein, 11 aa, Homo sapiens
EDVYVVGTVLR

SEQ ID NO: 989 - protein, 11 aa, Homo sapiens
EEAFLGITDEK

SEQ ID NO: 990 - protein, 23 aa, Homo sapiens
EEAFLGITDEKTEGQFVDLTGNR

SEQ ID NO: 991 - protein, 19 aa, Homo sapiens
EEAPSLRPAPPPISGGGYR

SEQ ID NO: 992 - protein, 9 aa, Homo sapiens
EEFHEQSFR

SEQ ID NO: 993 - protein, 11 aa, Homo sapiens
EEIGKELEELR

SEQ ID NO: 994 - protein, 9 aa, Homo sapiens
EEIIYECDK

SEQ ID NO: 995 - protein, 8 aa, Homo sapiens
EEILAQAK

SEQ ID NO: 996 - protein, 9 aa, Homo sapiens
EEILMHLWR

SEQ ID NO: 997 - protein, 10 aa, Homo sapiens
EELIGIAYNR

SEQ ID NO: 998 - protein, 10 aa, Homo sapiens
EELLPAQDIK

SEQ ID NO: 999 - protein, 7 aa, Homo sapiens
EELNALK

SEQ ID NO: 1000 - protein, 13 aa, Homo sapiens
EELVYELNPLDHR

SEQ ID NO: 1001 - protein, 13 aa, Homo sapiens
EENFYVDETTVVK

SEQ ID NO: 1002 - protein, 18 aa, Homo sapiens
EESPLLIGQQSTVSDVPR

SEQ ID NO: 1003 - protein, 28 aa, Homo sapiens
EESSSGSSHAVMDISLPTGISANEEDLK

SEQ ID NO: 1004 - protein, 9 aa, Homo sapiens
EETGQVLER

SEQ ID NO: 1005 - protein, 16 aa, Homo sapiens
EEYGHSEVVEYYCNPR

SEQ ID NO: 1006 - protein, 7 aa, Homo sapiens
EEYSNLK

SEQ ID NO: 1007 - protein, 9 aa, Homo sapiens
EFDHNSNIR

SEQ ID NO: 1008 - protein, 6 aa, Homo sapiens
EFFNGK

SEQ ID NO: 1009 - protein, 9 aa, Homo sapiens
EFGNTLEDK

SEQ ID NO: 1010 - protein, 7 aa, Homo sapiens
EFHLHLR

SEQ ID NO: 1011 - protein, 11 aa, Homo sapiens
EFHTTGLAWSK

SEQ ID NO: 1012 - protein, 6 aa, Homo sapiens
EFILQK

SEQ ID NO: 1013 - protein, 6 aa, Homo sapiens
EFLIEK

SEQ ID NO: 1014 - protein, 9 aa, Homo sapiens
EFMEEVIQR

SEQ ID NO: 1015 - protein, 8 aa, Homo sapiens
EFMSQGNK

SEQ ID NO: 1016 - protein, 19 aa, Homo sapiens
EFNAETFTFHADICTLSEK

SEQ ID NO: 1017 - protein, 21 aa, Homo sapiens
EFNAETFTFHADICTLSEKER

SEQ ID NO: 1018 - protein, 11 aa, Homo sapiens
EFNKYDTDGSK

SEQ ID NO: 1019 - protein, 21 aa, Homo sapiens
EFNLQNMGLPDFHIPENLFLK

SEQ ID NO: 1020 - protein, 12 aa, Homo sapiens
EFNPLVIVGLSK

SEQ ID NO: 1021 - protein, 8 aa, Homo sapiens
EFPELVAR

SEQ ID NO: 1022 - protein, 10 aa, Homo sapiens
EFPNQESLLK

SEQ ID NO: 1023 - protein, 5 aa, Homo sapiens
EFPYR

SEQ ID NO: 1024 - protein, 13 aa, Homo sapiens
EFPYRIPLDLVPK

SEQ ID NO: 1025 - protein, 7 aa, Homo sapiens
EFQEGLK

SEQ ID NO: 1026 - protein, 11 aa, Homo sapiens
EFQLFSSPHGK

SEQ ID NO: 1027 - protein, 11 aa, Homo sapiens
EFQVPTFTIPK

SEQ ID NO: 1028 - protein, 7 aa, Homo sapiens
EFSHLGK

SEQ ID NO: 1029 - protein, 20 aa, Homo sapiens
EFSHLGKEDFTSLSLVLYSR

SEQ ID NO: 1030 - protein, 15 aa, Homo sapiens
EFTEAFLGCPAIHPR

SEQ ID NO: 1031 - protein, 12 aa, Homo sapiens
EFTKLEEVLTNK

SEQ ID NO: 1032 - protein, 12 aa, Homo sapiens
EFTPPVQAAYQK

SEQ ID NO: 1033 - protein, 12 aa, Homo sapiens
EFTRPEEIIFLR

SEQ ID NO: 1034 - protein, 12 aa, Homo sapiens
EFVLLFMTFDEK

SEQ ID NO: 1035 - protein, 22 aa, Homo sapiens
EFVVMFSVVDENFSWYLEDNIK

SEQ ID NO: 1036 - protein, 22 aa, Homo sapiens
EFYLFPTVFDENESLLLEDNIR

SEQ ID NO: 1037 - protein, 19 aa, Homo sapiens
EGAIHREELVYELNPLDHR

SEQ ID NO: 1038 - protein, 7 aa, Homo sapiens
EGAVLAK

SEQ ID NO: 1039 - protein, 10 aa, Homo sapiens
EGDCPVQSGK

SEQ ID NO: 1040 - protein, 10 aa, Homo sapiens
EGDDDRTVCR

SEQ ID NO: 1041 - protein, 16 aa, Homo sapiens
EGETITEVIHGEPIIK

SEQ ID NO: 1042 - protein, 20 aa, Homo sapiens
EGFGHLSPTGTTEFWLGNEK

SEQ ID NO: 1043 - protein, 35 aa, Homo sapiens
EGFGHLSPTGTTEFWLGNEKIHLISTQSAIPYALR

SEQ ID NO: 1044 - protein, 5 aa, Homo sapiens
EGGPK

SEQ ID NO: 1045 - protein, 11 aa, Homo sapiens
EGGQTAPASTR

SEQ ID NO: 1046 - protein, 31 aa, Homo sapiens
EGISQEALHTQMLTAVQEISHLIEPLANAAR

SEQ ID NO: 1047 - protein, 8 aa, Homo sapiens
EGIVEYPR

SEQ ID NO: 1048 - protein, 16 aa, Homo sapiens
EGKPYLVLGLLWQVIK

SEQ ID NO: 1049 - protein, 7 aa, Homo sapiens
EGLELLK

SEQ ID NO: 1050 - protein, 10 aa, Homo sapiens
EGMLSIMSYR

SEQ ID NO: 1051 - protein, 29 aa, Homo sapiens
EGNKPVLFQGNTNPTDVVVAVFPKPLITR

SEQ ID NO: 1052 - protein, 6 aa, Homo sapiens
EGNPYK

SEQ ID NO: 1053 - protein, 28 aa, Homo sapiens
EGPPSEHSGTEHASASANGHVSYSAVSR

SEQ ID NO: 1054 - protein, 14 aa, Homo sapiens
EGQMESVEAAMSSK

SEQ ID NO: 1055 - protein, 10 aa, Homo sapiens
EGTETFADHR

SEQ ID NO: 1056 - protein, 7 aa, Homo sapiens
EGTYHFR

SEQ ID NO: 1057 - protein, 10 aa, Homo sapiens
EGVHGGLINK

SEQ ID NO: 1058 - protein, 11 aa, Homo sapiens
EGVHGGLINKK

SEQ ID NO: 1059 - protein, 10 aa, Homo sapiens
EGVKFDESEK

SEQ ID NO: 1060 - protein, 9 aa, Homo sapiens
EGVVAAAEK

SEQ ID NO: 1061 - protein, 13 aa, Homo sapiens
EGVVHGVATVAEK

SEQ ID NO: 1062 - protein, 12 aa, Homo sapiens
EGWIHTVCINGR

SEQ ID NO: 1063 - protein, 19 aa, Homo sapiens
EGYSNISYIVVNHQGISSR

SEQ ID NO: 1064 - protein, 11 aa, Homo sapiens
EGYYGYTGAFR

SEQ ID NO: 1065 - protein, 14 aa, Homo sapiens
EHAVEGDCDFQLLK

SEQ ID NO: 1066 - protein, 18 aa, Homo sapiens
EHAVEGDCDFQLLKLDGK

SEQ ID NO: 1067 - protein, 16 aa, Homo sapiens
EHEGAIYPDNTTDFQR

SEQ ID NO: 1068 - protein, 21 aa, Homo sapiens
EHGDPLIEELNPGDALEPEGR

SEQ ID NO: 1069 - protein, 18 aa, Homo sapiens
EHIVDLEMLTVSSIGTFR

SEQ ID NO: 1070 - protein, 16 aa, Homo sapiens
EHLLMALADLDELLIR

SEQ ID NO: 1071 - protein, 16 aa, Homo sapiens
EHLLMALAGIDTLLIR

SEQ ID NO: 1072 - protein, 15 aa, Homo sapiens
EHLVQATPENLQEAR

SEQ ID NO: 1073 - protein, 10 aa, Homo sapiens
EHMQPTHPIR

SEQ ID NO: 1074 - protein, 11 aa, Homo sapiens
EHNLQVLGLVK

SEQ ID NO: 1075 - protein, 9 aa, Homo sapiens
EHSSLAFWK

SEQ ID NO: 1076 - protein, 10 aa, Homo sapiens
EHVAHLLFLR

SEQ ID NO: 1077 - protein, 13 aa, Homo sapiens
EHVAHLLFLRDTK

SEQ ID NO: 1078 - protein, 13 aa, Homo sapiens
EHVTVYLGLHDVR

SEQ ID NO: 1079 - protein, 9 aa, Homo sapiens
EIAEAYLGK

SEQ ID NO: 1080 - protein, 5 aa, Homo sapiens
EIDYK

SEQ ID NO: 1081 - protein, 6 aa, Homo sapiens
EIEASK

SEQ ID NO: 1082 - protein, 6 aa, Homo sapiens
EIEEIR

SEQ ID NO: 1083 - protein, 6 aa, Homo sapiens
EIEELR

SEQ ID NO: 1084 - protein, 10 aa, Homo sapiens
EIEMINESEK

SEQ ID NO: 1085 - protein, 7 aa, Homo sapiens
EIENQLR

SEQ ID NO: 1086 - protein, 23 aa, Homo sapiens
EIETYHNLLEGGQEDFESSGAGK

SEQ ID NO: 1087 - protein, 7 aa, Homo sapiens
EIFNMAR

SEQ ID NO: 1088 - protein, 9 aa, Homo sapiens
EIGELYLPK

SEQ ID NO: 1089 - protein, 14 aa, Homo sapiens
EIGELYLPKFSISR

SEQ ID NO: 1090 - protein, 9 aa, Homo sapiens
EIIIHQNYK

SEQ ID NO: 1091 - protein, 8 aa, Homo sapiens
EIIKPAEK

SEQ ID NO: 1092 - protein, 19 aa, Homo sapiens
EIINVGHSFHVNFEDNDNR

SEQ ID NO: 1093 - protein, 6 aa, Homo sapiens
EIIQEK

SEQ ID NO: 1094 - protein, 6 aa, Homo sapiens
EIISQR

SEQ ID NO: 1095 - protein, 5 aa, Homo sapiens
EIIVK

SEQ ID NO: 1096 - protein, 11 aa, Homo sapiens
EIKIEISELNR

SEQ ID NO: 1097 - protein, 6 aa, Homo sapiens
EILAGK

SEQ ID NO: 1098 - protein, 5 aa, Homo sapiens
EILIR

SEQ ID NO: 1099 - protein, 5 aa, Homo sapiens
EILLR

SEQ ID NO: 1100 - protein, 8 aa, Homo sapiens
EILNINQK

SEQ ID NO: 1101 - protein, 8 aa, Homo sapiens
EILNSLDK

SEQ ID NO: 1102 - protein, 5 aa, Homo sapiens
EILVK

SEQ ID NO: 1103 - protein, 11 aa, Homo sapiens
EIMENYNIALR

SEQ ID NO: 1104 - protein, 6 aa, Homo sapiens
EINISR

SEQ ID NO: 1105 - protein, 21 aa, Homo sapiens
EINLAPDSSSVVVSGLMVATK

SEQ ID NO: 1106 - protein, 6 aa, Homo sapiens
EINLQK

SEQ ID NO: 1107 - protein, 6 aa, Homo sapiens
EINVQK

SEQ ID NO: 1108 - protein, 16 aa, Homo sapiens
EIPAWVPFDPAAQITK

SEQ ID NO: 1109 - protein, 17 aa, Homo sapiens
EIPDEISILLLGVAHFK

SEQ ID NO: 1110 - protein, 7 aa, Homo sapiens
EIPEYRK

SEQ ID NO: 1111 - protein, 17 aa, Homo sapiens
EIPVLVTQISSTNHPVK

SEQ ID NO: 1112 - protein, 12 aa, Homo sapiens
EIPVTVYKPIIK

SEQ ID NO: 1113 - protein, 13 aa, Homo sapiens
EIPVTVYRPTLTK

SEQ ID NO: 1114 - protein, 6 aa, Homo sapiens
EIQIYK

SEQ ID NO: 1115 - protein, 7 aa, Homo sapiens
EIQIYKK

SEQ ID NO: 1116 - protein, 10 aa, Homo sapiens
EIQNAVNGVK

SEQ ID NO: 1117 - protein, 5 aa, Homo sapiens
EIQQR

SEQ ID NO: 1118 - protein, 7 aa, Homo sapiens
EIQTAVR

SEQ ID NO: 1119 - protein, 15 aa, Homo sapiens
EISLWFKPEELVDYK

SEQ ID NO: 1120 - protein, 11 aa, Homo sapiens
EITALAPSTMK

SEQ ID NO: 1121 - protein, 10 aa, Homo sapiens
EITQEMQTLK

SEQ ID NO: 1122 - protein, 18 aa, Homo sapiens
EITVATGGFIYTGEVVHR

SEQ ID NO: 1123 - protein, 5 aa, Homo sapiens
EIVLK

SEQ ID NO: 1124 - protein, 6 aa, Homo sapiens
EIVLPK

SEQ ID NO: 1125 - protein, 15 aa, Homo sapiens
EKAEAQAQYSAAVAK

SEQ ID NO: 1126 - protein, 12 aa, Homo sapiens
EKAEGDVAALNR

SEQ ID NO: 1127 - protein, 8 aa, Homo sapiens
EKELLAAK

SEQ ID NO: 1128 - protein, 24 aa, Homo sapiens
EKFSDASYQSINIPVTQNMVPSSR

SEQ ID NO: 1129 - protein, 11 aa, Homo sapiens
EKGEIQNILQK

SEQ ID NO: 1130 - protein, 11 aa, Homo sapiens
EKLEATINELV

SEQ ID NO: 1131 - protein, 11 aa, Homo sapiens
EKLQDEDLGFL

SEQ ID NO: 1132 - protein, 24 aa, Homo sapiens
EKPQSTISGLLGPTLYAEVGDIIK

SEQ ID NO: 1133 - protein, 8 aa, Homo sapiens
ELAAQITK

SEQ ID NO: 1134 - protein, 8 aa, Homo sapiens
ELAAQTIK

SEQ ID NO: 1135 - protein, 9 aa, Homo sapiens
ELAAQTIKK

SEQ ID NO: 1136 - protein, 6 aa, Homo sapiens
ELAEEK

SEQ ID NO: 1137 - protein, 17 aa, Homo sapiens
ELAILLGMLDPAEKDEK

SEQ ID NO: 1138 - protein, 7 aa, Homo sapiens
ELANEIR

SEQ ID NO: 1139 - protein, 7 aa, Homo sapiens
ELANELR

SEQ ID NO: 1140 - protein, 7 aa, Homo sapiens
ELANILK

SEQ ID NO: 1141 - protein, 6 aa, Homo sapiens
ELAVFR

SEQ ID NO: 1142 - protein, 17 aa, Homo sapiens
ELDRDTVFALVNYIFFK

SEQ ID NO: 1143 - protein, 11 aa, Homo sapiens
ELDSTGTPTGK

SEQ ID NO: 1144 - protein, 6 aa, Homo sapiens
ELEAFR

SEQ ID NO: 1145 - protein, 6 aa, Homo sapiens
ELEASK

SEQ ID NO: 1146 - protein, 6 aa, Homo sapiens
ELEEIR

SEQ ID NO: 1147 - protein, 12 aa, Homo sapiens
ELEEIVQPIISK

SEQ ID NO: 1148 - protein, 6 aa, Homo sapiens
ELEELR

SEQ ID NO: 1149 - protein, 14 aa, Homo sapiens
ELELQIGNALFIGK

SEQ ID NO: 1150 - protein, 7 aa, Homo sapiens
ELENALK

SEQ ID NO: 1151 - protein, 8 aa, Homo sapiens
ELESEVNK

SEQ ID NO: 1152 - protein, 5 aa, Homo sapiens
ELFYK

SEQ ID NO: 1153 - protein, 21 aa, Homo sapiens
ELFYKADGESCSASMMYQEGK

SEQ ID NO: 1154 - protein, 25 aa, Homo sapiens
ELGCGAASGTPSGILYEPPAEKEQK

SEQ ID NO: 1155 - protein, 17 aa, Homo sapiens
ELHHLQEQNVSNAFLDK

SEQ ID NO: 1156 - protein, 25 aa, Homo sapiens
ELHHLQEQNVSNAFLDKGEFYIGSK

SEQ ID NO: 1157 - protein, 7 aa, Homo sapiens
ELIEQLR

SEQ ID NO: 1158 - protein, 5 aa, Homo sapiens
ELILR

SEQ ID NO: 1159 - protein, 8 aa, Homo sapiens
ELISERWK

SEQ ID NO: 1160 - protein, 12 aa, Homo sapiens
ELISNASDALDK

SEQ ID NO: 1161 - protein, 12 aa, Homo sapiens
ELISNSSDALDK

SEQ ID NO: 1162 - protein, 5 aa, Homo sapiens
ELIVK

SEQ ID NO: 1163 - protein, 12 aa, Homo sapiens
ELKEQQDSPGNK

SEQ ID NO: 1164 - protein, 10 aa, Homo sapiens
ELLALIQLER

SEQ ID NO: 1165 - protein, 11 aa, Homo sapiens
ELLDTVTAPQK

SEQ ID NO: 1166 - protein, 10 aa, Homo sapiens
ELLESYIDGR

SEQ ID NO: 1167 - protein, 5 aa, Homo sapiens
ELLIR

SEQ ID NO: 1168 - protein, 8 aa, Homo sapiens
ELLLDLAK

SEQ ID NO: 1169 - protein, 5 aa, Homo sapiens
ELLLR

SEQ ID NO: 1170 - protein, 11 aa, Homo sapiens
ELLPVLISAMK

SEQ ID NO: 1171 - protein, 5 aa, Homo sapiens
ELLVK

SEQ ID NO: 1172 - protein, 6 aa, Homo sapiens
ELLVPR

SEQ ID NO: 1173 - protein, 6 aa, Homo sapiens
ELMEEK

SEQ ID NO: 1174 - protein, 8 aa, Homo sapiens
ELNELGSK

SEQ ID NO: 1175 - protein, 9 aa, Homo sapiens
ELNELGSKK

SEQ ID NO: 1176 - protein, 20 aa, Homo sapiens
ELNQAGQETLVTGWGYHSSR

SEQ ID NO: 1177 - protein, 5 aa, Homo sapiens
ELNYK

SEQ ID NO: 1178 - protein, 8 aa, Homo sapiens
ELPEHTVK

SEQ ID NO: 1179 - protein, 16 aa, Homo sapiens
ELPEHTVKLCDNLSTK

SEQ ID NO: 1180 - protein, 20 aa, Homo sapiens
ELPPHLGELTVAEETSSSLR

SEQ ID NO: 1181 - protein, 9 aa, Homo sapiens
ELPQSIVYK

SEQ ID NO: 1182 - protein, 8 aa, Homo sapiens
ELPSFLGK

SEQ ID NO: 1183 - protein, 12 aa, Homo sapiens
ELPSLQHPNEQK

SEQ ID NO: 1184 - protein, 8 aa, Homo sapiens
ELQAAQAR

SEQ ID NO: 1185 - protein, 12 aa, Homo sapiens
ELQAHGADELLK

SEQ ID NO: 1186 - protein, 15 aa, Homo sapiens
ELQELVQYPVEHPDK

SEQ ID NO: 1187 - protein, 26 aa, Homo sapiens
ELQKPDSFHSLTPTFAAVLVHIDNLR

SEQ ID NO: 1188 - protein, 5 aa, Homo sapiens
ELQQR

SEQ ID NO: 1189 - protein, 9 aa, Homo sapiens
ELQVYISPK

SEQ ID NO: 1190 - protein, 13 aa, Homo sapiens
ELRPWCFTTDPNK

SEQ ID NO: 1191 - protein, 14 aa, Homo sapiens
ELRPWCFTTDPNKR

SEQ ID NO: 1192 - protein, 8 aa, Homo sapiens
ELSDIAHR

SEQ ID NO: 1193 - protein, 15 aa, Homo sapiens
ELSHLPSLYDYSAYR

SEQ ID NO: 1194 - protein, 16 aa, Homo sapiens
ELSHLPSLYDYSAYRR

SEQ ID NO: 1195 - protein, 8 aa, Homo sapiens
ELSSFIDK

SEQ ID NO: 1196 - protein, 13 aa, Homo sapiens
ELSYYSLEDLNNK

SEQ ID NO: 1197 - protein, 6 aa, Homo sapiens
ELTEEK

SEQ ID NO: 1198 - protein, 7 aa, Homo sapiens
ELTIGSK

SEQ ID NO: 1199 - protein, 8 aa, Homo sapiens
ELTLEDLK

SEQ ID NO: 1200 - protein, 25 aa, Homo sapiens
ELTPEVLQEWLDELEEMMLVVHMPR

SEQ ID NO: 1201 - protein, 11 aa, Homo sapiens
ELTPQVVSAAR

SEQ ID NO: 1202 - protein, 17 aa, Homo sapiens
ELTTEIDNNIEQISSYK

SEQ ID NO: 1203 - protein, 7 aa, Homo sapiens
ELVAQGK

SEQ ID NO: 1204 - protein, 5 aa, Homo sapiens
ELVIK

SEQ ID NO: 1205 - protein, 8 aa, Homo sapiens
ELVLAGNR

SEQ ID NO: 1206 - protein, 5 aa, Homo sapiens
ELVLK

SEQ ID NO: 1207 - protein, 9 aa, Homo sapiens
ELVNMILMK

SEQ ID NO: 1208 - protein, 11 aa, Homo sapiens
EMEAELEDERK

SEQ ID NO: 1209 - protein, 10 aa, Homo sapiens
EMEDTLNHLK

SEQ ID NO: 1210 - protein, 9 aa, Homo sapiens
EMQPTHPIR

SEQ ID NO: 1211 - protein, 13 aa, Homo sapiens
EMSGSPASGIPVK

SEQ ID NO: 1212 - protein, 18 aa, Homo sapiens
ENADSLQASLRPHADELK

SEQ ID NO: 1213 - protein, 11 aa, Homo sapiens
ENAGEDPGLAR

SEQ ID NO: 1214 - protein, 18 aa, Homo sapiens
ENALMPNWLHLPVGYHGR

SEQ ID NO: 1215 - protein, 8 aa, Homo sapiens
ENERFQYK

SEQ ID NO: 1216 - protein, 11 aa, Homo sapiens
ENFAGEATLQR

SEQ ID NO: 1217 - protein, 5 aa, Homo sapiens
ENFDK

SEQ ID NO: 1218 - protein, 11 aa, Homo sapiens
ENFLFLTPDCK

SEQ ID NO: 1219 - protein, 8 aa, Homo sapiens
ENFQNWLK

SEQ ID NO: 1220 - protein, 24 aa, Homo sapiens
ENIQDNISLFSLGMGFDVDYDFLK

SEQ ID NO: 1221 - protein, 25 aa, Homo sapiens
ENIQDNISLFSLGMGFDVDYDFLKR

SEQ ID NO: 1222 - protein, 11 aa, Homo sapiens
ENLDRDIALMK

SEQ ID NO: 1223 - protein, 8 aa, Homo sapiens
ENLLDFIK

SEQ ID NO: 1224 - protein, 10 aa, Homo sapiens
ENPLTQAVPK

SEQ ID NO: 1225 - protein, 16 aa, Homo sapiens
ENQLEVLEVSWLHGLK

SEQ ID NO: 1226 - protein, 15 aa, Homo sapiens
ENSLYLTAFTVIGIR

SEQ ID NO: 1227 - protein, 16 aa, Homo sapiens
ENSLYLTAFTVIGIRK

SEQ ID NO: 1228 - protein, 9 aa, Homo sapiens
ENSQYQPIK

SEQ ID NO: 1229 - protein, 19 aa, Homo sapiens
ENSQYQPIKLQGTLPVEAR

SEQ ID NO: 1230 - protein, 8 aa, Homo sapiens
EPADAAIR

SEQ ID NO: 1231 - protein, 18 aa, Homo sapiens
EPAHLMSLFGGKPMIIYK

SEQ ID NO: 1232 - protein, 20 aa, Homo sapiens
EPCVESLVSQYFQTVTDYGK

SEQ ID NO: 1233 - protein, 6 aa, Homo sapiens
EPFEEK

SEQ ID NO: 1234 - protein, 17 aa, Homo sapiens
EPGEGLAVTVSLIGAYK

SEQ ID NO: 1235 - protein, 8 aa, Homo sapiens
EPGLQIWR

SEQ ID NO: 1236 - protein, 16 aa, Homo sapiens
EPQDTYHYLPFSLPHR

SEQ ID NO: 1237 - protein, 9 aa, Homo sapiens
EPQQRLNIK

SEQ ID NO: 1238 - protein, 32 aa, Homo sapiens
EPVAEPDIMATNGVVHVITNVLQPPANRPQER

SEQ ID NO: 1239 - protein, 5 aa, Homo sapiens
EPVFR

SEQ ID NO: 1240 - protein, 12 aa, Homo sapiens
EQADFAIEALAK

SEQ ID NO: 1241 - protein, 12 aa, Homo sapiens
EQADFALEALAK

SEQ ID NO: 1242 - protein, 10 aa, Homo sapiens
EQAFLTYHMK

SEQ ID NO: 1243 - protein, 12 aa, Homo sapiens
EQAPHCICANGR

SEQ ID NO: 1244 - protein, 20 aa, Homo sapiens
EQAPNLVYMVTGNPASDEIK

SEQ ID NO: 1245 - protein, 14 aa, Homo sapiens
EQAWQRPDGQPATR

SEQ ID NO: 1246 - protein, 18 aa, Homo sapiens
EQDLEVILHNGACSPGAR

SEQ ID NO: 1247 - protein, 8 aa, Homo sapiens
EQEVNILK

SEQ ID NO: 1248 - protein, 7 aa, Homo sapiens
EQFLQQK

SEQ ID NO: 1249 - protein, 13 aa, Homo sapiens
EQGVEEHETLLLR

SEQ ID NO: 1250 - protein, 11 aa, Homo sapiens
EQHLFLPFSYK

SEQ ID NO: 1251 - protein, 6 aa, Homo sapiens
EQHLQK

SEQ ID NO: 1252 - protein, 10 aa, Homo sapiens
EQLEEEEEAK

SEQ ID NO: 1253 - protein, 7 aa, Homo sapiens
EQLELLK

SEQ ID NO: 1254 - protein, 16 aa, Homo sapiens
EQLGPVTQEFWDNLEK

SEQ ID NO: 1255 - protein, 22 aa, Homo sapiens
EQLGPVTQEFWDNLEKETEGLR

SEQ ID NO: 1256 - protein, 8 aa, Homo sapiens
EQLNLLSR

SEQ ID NO: 1257 - protein, 16 aa, Homo sapiens
EQLQDMGLVDLFSPEK

SEQ ID NO: 1258 - protein, 8 aa, Homo sapiens
EQLSLLDR

SEQ ID NO: 1259 - protein, 14 aa, Homo sapiens
EQLSLLDRFTEDAK

SEQ ID NO: 1260 - protein, 8 aa, Homo sapiens
EQLTPLIK

SEQ ID NO: 1261 - protein, 8 aa, Homo sapiens
EQPGVYTK

SEQ ID NO: 1262 - protein, 8 aa, Homo sapiens
EQPPSLTR

SEQ ID NO: 1263 - protein, 11 aa, Homo sapiens
EQQALQTVCLK

SEQ ID NO: 1264 - protein, 11 aa, Homo sapiens
EQQCVIMAENR

SEQ ID NO: 1265 - protein, 12 aa, Homo sapiens
EQQCVIMAENRK

SEQ ID NO: 1266 - protein, 13 aa, Homo sapiens
EQTMSECEAGALR

SEQ ID NO: 1267 - protein, 7 aa, Homo sapiens
EQVAEVR

SEQ ID NO: 1268 - protein, 18 aa, Homo sapiens
EQVQSCGPPPELLNGNVK

SEQ ID NO: 1269 - protein, 12 aa, Homo sapiens
EQVVEDRPVGGR

SEQ ID NO: 1270 - protein, 8 aa, Homo sapiens
EQWILTAR

SEQ ID NO: 1271 - protein, 16 aa, Homo sapiens
EQYAVVGHSAHIVTLK

SEQ ID NO: 1272 - protein, 22 aa, Homo sapiens
EREEYVLNDIGVIFYGEVNDIK

SEQ ID NO: 1273 - protein, 8 aa, Homo sapiens
ERELEEAR

SEQ ID NO: 1274 - protein, 25 aa, Homo sapiens
ERGPEEEHLGILGPVIWAEVGDTIR

SEQ ID NO: 1275 - protein, 19 aa, Homo sapiens
ERPGVYTNVVEYVDWILEK

SEQ ID NO: 1276 - protein, 9 aa, Homo sapiens
ESASLMVDR

SEQ ID NO: 1277 - protein, 9 aa, Homo sapiens
ESDEETQIK

SEQ ID NO: 1278 - protein, 25 aa, Homo sapiens
ESDEETQIKVNWEEEAASGLLTSLK

SEQ ID NO: 1279 - protein, 10 aa, Homo sapiens
ESDTSYVSLK

SEQ ID NO: 1280 - protein, 10 aa, Homo sapiens
ESGMTMEELK

SEQ ID NO: 1281 - protein, 8 aa, Homo sapiens
ESGPPHMK

SEQ ID NO: 1282 - protein, 13 aa, Homo sapiens
ESHVTLASPEETR

SEQ ID NO: 1283 - protein, 20 aa, Homo sapiens
ESILFHYTDWVDDQRPENYR

SEQ ID NO: 1284 - protein, 14 aa, Homo sapiens
ESISVSSEQLAQFR

SEQ ID NO: 1285 - protein, 27 aa, Homo sapiens
ESIVQVHIEVLDENDNAPEFAKPYQPK

SEQ ID NO: 1286 - protein, 12 aa, Homo sapiens
ESKPLTAQQTTK

SEQ ID NO: 1287 - protein, 13 aa, Homo sapiens
ESLLNHFLYEVAR

SEQ ID NO: 1288 - protein, 11 aa, Homo sapiens
ESLSSYWESAK

SEQ ID NO: 1289 - protein, 5 aa, Homo sapiens
ESMLK

SEQ ID NO: 1290 - protein, 14 aa, Homo sapiens
ESNTVFSFLGLKPR

SEQ ID NO: 1291 - protein, 27 aa, Homo sapiens
ESPGNVQIVNGYFVHFFAPQGLPVVPK

SEQ ID NO: 1292 - protein, 11 aa, Homo sapiens
ESQLPTVMDFR

SEQ ID NO: 1293 - protein, 12 aa, Homo sapiens
ESQLPTVMDFRK

SEQ ID NO: 1294 - protein, 15 aa, Homo sapiens
ESSSHHPGIAEFPSR

SEQ ID NO: 1295 - protein, 17 aa, Homo sapiens
ESSSHHPGIAEFPSRGK

SEQ ID NO: 1296 - protein, 9 aa, Homo sapiens
ESTLHLVLR

SEQ ID NO: 1297 - protein, 11 aa, Homo sapiens
ESYSGVTLDPR

SEQ ID NO: 1298 - protein, 12 aa, Homo sapiens
ETAASLLQAGYK

SEQ ID NO: 1299 - protein, 15 aa, Homo sapiens
ETAVDGELVVLYDVK

SEQ ID NO: 1300 - protein, 16 aa, Homo sapiens
ETAVDGELVVLYDVKR

SEQ ID NO: 1301 - protein, 13 aa, Homo sapiens
ETAVSTEDDSHHK

SEQ ID NO: 1302 - protein, 18 aa, Homo sapiens
ETDIEDSDDIPEDTTYKK

SEQ ID NO: 1303 - protein, 11 aa, Homo sapiens
ETEGLRQEMSK

SEQ ID NO: 1304 - protein, 7 aa, Homo sapiens
ETESIEK

SEQ ID NO: 1305 - protein, 13 aa, Homo sapiens
ETFDVTLEPLSFK

SEQ ID NO: 1306 - protein, 14 aa, Homo sapiens
ETFDVTLEPLSFKK

SEQ ID NO: 1307 - protein, 10 aa, Homo sapiens
ETGEHLVHVK

SEQ ID NO: 1308 - protein, 19 aa, Homo sapiens
ETIELVHTEPTDVAQLPSR

SEQ ID NO: 1309 - protein, 7 aa, Homo sapiens
ETIEQEK

SEQ ID NO: 1310 - protein, 6 aa, Homo sapiens
ETIVLK

SEQ ID NO: 1311 - protein, 5 aa, Homo sapiens
ETLCK

SEQ ID NO: 1312 - protein, 7 aa, Homo sapiens
ETLEDTR

SEQ ID NO: 1313 - protein, 9 aa, Homo sapiens
ETLEDTRDR

SEQ ID NO: 1314 - protein, 11 aa, Homo sapiens
ETLFSVMPGLK

SEQ ID NO: 1315 - protein, 8 aa, Homo sapiens
ETLLQDFR

SEQ ID NO: 1316 - protein, 6 aa, Homo sapiens
ETLVLK

SEQ ID NO: 1317 - protein, 7 aa, Homo sapiens
ETQSIEK

SEQ ID NO: 1318 - protein, 8 aa, Homo sapiens
ETSLTVNK

SEQ ID NO: 1319 - protein, 11 aa, Homo sapiens
ETSNFGFSLLR

SEQ ID NO: 1320 - protein, 22 aa, Homo sapiens
ETTFNSLLCPSGGEVSEELSLK

SEQ ID NO: 1321 - protein, 10 aa, Homo sapiens
ETTLGDMTGK

SEQ ID NO: 1322 - protein, 8 aa, Homo sapiens
ETTLSYYK

SEQ ID NO: 1323 - protein, 32 aa, Homo sapiens
ETVLTFIDPEGSEVDMVEEIDHIGIISFPDFK

SEQ ID NO: 1324 - protein, 38 aa, Homo sapiens
ETVLTFIDPEGSEVDMVEEIDHIGIISFPDFKIPSNPR

SEQ ID NO: 1325 - protein, 13 aa, Homo sapiens
ETVQTTEDQILKR

SEQ ID NO: 1326 - protein, 9 aa, Homo sapiens
ETWTANVGK

SEQ ID NO: 1327 - protein, 10 aa, Homo sapiens
EVAFDLEIPK

SEQ ID NO: 1328 - protein, 10 aa, Homo sapiens
EVALDLSQHK

SEQ ID NO: 1329 - protein, 11 aa, Homo sapiens
EVANSTANLVK

SEQ ID NO: 1330 - protein, 5 aa, Homo sapiens
EVDIK

SEQ ID NO: 1331 - protein, 5 aa, Homo sapiens
EVDLK

SEQ ID NO: 1332 - protein, 12 aa, Homo sapiens
EVDLKDYEDQQK

SEQ ID NO: 1333 - protein, 8 aa, Homo sapiens
EVEEDEYK

SEQ ID NO: 1334 - protein, 7 aa, Homo sapiens
EVEIREE

SEQ ID NO: 1335 - protein, 9 aa, Homo sapiens
EVENSEDPK

SEQ ID NO: 1336 - protein, 11 aa, Homo sapiens
EVENSEDPKFR

SEQ ID NO: 1337 - protein, 20 aa, Homo sapiens
EVFNILQAAYVSKPGAQLAR

SEQ ID NO: 1338 - protein, 10 aa, Homo sapiens
EVFVHPNYSK

SEQ ID NO: 1339 - protein, 15 aa, Homo sapiens
EVGPPLPQEAVPLQK

SEQ ID NO: 1340 - protein, 14 aa, Homo sapiens
EVGPTNADPVCLAK

SEQ ID NO: 1341 - protein, 24 aa, Homo sapiens
EVGTPHGIILDSVDAAFICPGSSR

SEQ ID NO: 1342 - protein, 12 aa, Homo sapiens
EVGTVLSQVYSK

SEQ ID NO: 1343 - protein, 18 aa, Homo sapiens
EVIAVYQLFVETTDVNGK

SEQ ID NO: 1344 - protein, 13 aa, Homo sapiens
EVIITGIQTQGAK

SEQ ID NO: 1345 - protein, 12 aa, Homo sapiens
EVIQEWNLTNIK

SEQ ID NO: 1346 - protein, 13 aa, Homo sapiens
EVIQEWNLTNIKR

SEQ ID NO: 1347 - protein, 6 aa, Homo sapiens
EVLLPK

SEQ ID NO: 1348 - protein, 9 aa, Homo sapiens
EVLYELIEK

SEQ ID NO: 1349 - protein, 5 aa, Homo sapiens
EVLYK

SEQ ID NO: 1350 - protein, 6 aa, Homo sapiens
EVNINK

SEQ ID NO: 1351 - protein, 8 aa, Homo sapiens
EVPCASVK

SEQ ID NO: 1352 - protein, 12 aa, Homo sapiens
EVPLNTIIFMGR

SEQ ID NO: 1353 - protein, 15 aa, Homo sapiens
EVQGFESATFLGYFK

SEQ ID NO: 1354 - protein, 10 aa, Homo sapiens
EVSFDVELPK

SEQ ID NO: 1355 - protein, 10 aa, Homo sapiens
EVTVLLEHQK

SEQ ID NO: 1356 - protein, 12 aa, Homo sapiens
EVVADSVWVDVK

SEQ ID NO: 1357 - protein, 6 aa, Homo sapiens
EVVDWR

SEQ ID NO: 1358 - protein, 32 aa, Homo sapiens
EVVPRPRPGVTEATITGLEPGTEYTIYVIALK

SEQ ID NO: 1359 - protein, 30 aa, Homo sapiens
EVVTSEDGSDCPEAMDLGTLSGIGTLDGFR

SEQ ID NO: 1360 - protein, 10 aa, Homo sapiens
EVYGFNPEGK

SEQ ID NO: 1361 - protein, 5 aa, Homo sapiens
EVYIK

SEQ ID NO: 1362 - protein, 9 aa, Homo sapiens
EVYIKNGDK

SEQ ID NO: 1363 - protein, 25 aa, Homo sapiens
EVYMPSSIFQDDFVIPDISEPGTWK

SEQ ID NO: 1364 - protein, 19 aa, Homo sapiens
EWEIVNQDNHYSPHFQEIR

SEQ ID NO: 1365 - protein, 9 aa, Homo sapiens
EWFSETFQK

SEQ ID NO: 1366 - protein, 12 aa, Homo sapiens
EWFWDLATGTMK

SEQ ID NO: 1367 - protein, 5 aa, Homo sapiens
EWYEK

SEQ ID NO: 1368 - protein, 27 aa, Homo sapiens
EYANQFMWEYSTNYGQAPLSLLVSYTK

SEQ ID NO: 1369 - protein, 9 aa, Homo sapiens
EYAPGETVK

SEQ ID NO: 1370 - protein, 5 aa, Homo sapiens
EYAVK

SEQ ID NO: 1371 - protein, 5 aa, Homo sapiens
EYEMK

SEQ ID NO: 1372 - protein, 7 aa, Homo sapiens
EYEPYFK

SEQ ID NO: 1373 - protein, 10 aa, Homo sapiens
EYFAIDNSGR

SEQ ID NO: 1374 - protein, 5 aa, Homo sapiens
EYFSK

SEQ ID NO: 1375 - protein, 9 aa, Homo sapiens
EYGKSLNSK

SEQ ID NO: 1376 - protein, 9 aa, Homo sapiens
EYHFGQAVR

SEQ ID NO: 1377 - protein, 6 aa, Homo sapiens
EYHTEK

SEQ ID NO: 1378 - protein, 35 aa, Homo sapiens
EYLIMGLDGATYDLEGHPQYLLDSNSWIEEMPSER

SEQ ID NO: 1379 - protein, 5 aa, Homo sapiens
EYQTR

SEQ ID NO: 1380 - protein, 17 aa, Homo sapiens
EYSGTIASEANTYLNSK

SEQ ID NO: 1381 - protein, 10 aa, Homo sapiens
EYTDASFTNR

SEQ ID NO: 1382 - protein, 11 aa, Homo sapiens
EYTDASFTNRK

SEQ ID NO: 1383 - protein, 8 aa, Homo sapiens
EYTNIFLK

SEQ ID NO: 1384 - protein, 21 aa, Homo sapiens
EYVLPHFSVSIEPEYNFIGYK

SEQ ID NO: 1385 - protein, 16 aa, Homo sapiens
EYVLPSFEVIVEPTEK

SEQ ID NO: 1386 - protein, 20 aa, Homo sapiens
EYYFAEAQIADFSDPAFISK

SEQ ID NO: 1387 - protein, 7 aa, Homo sapiens
FAAFIDK

SEQ ID NO: 1388 - protein, 7 aa, Homo sapiens
FACYYPR

SEQ ID NO: 1389 - protein, 14 aa, Homo sapiens
FADQHVPGSPFSVK

SEQ ID NO: 1390 - protein, 7 aa, Homo sapiens
FAEEDKK

SEQ ID NO: 1391 - protein, 7 aa, Homo sapiens
FAFNLYR

SEQ ID NO: 1392 - protein, 9 aa, Homo sapiens
FAGVFHVEK

SEQ ID NO: 1393 - protein, 9 aa, Homo sapiens
FAHNVVTMR

SEQ ID NO: 1394 - protein, 31 aa, Homo sapiens
FAHTNVESLVNEYDDNGEGIILFRPSHLTNK

SEQ ID NO: 1395 - protein, 9 aa, Homo sapiens
FAHTVVTSR

SEQ ID NO: 1396 - protein, 18 aa, Homo sapiens
FAHYVVTSQVVNTANEAR

SEQ ID NO: 1397 - protein, 23 aa, Homo sapiens
FALPSPQHILGLPVGQHIYLSAR

SEQ ID NO: 1398 - protein, 10 aa, Homo sapiens
FAPVVAPKPK

SEQ ID NO: 1399 - protein, 7 aa, Homo sapiens
FASFIDK

SEQ ID NO: 1400 - protein, 9 aa, Homo sapiens
FASFIDKVR

SEQ ID NO: 1401 - protein, 5 aa, Homo sapiens
FASGK

SEQ ID NO: 1402 - protein, 5 aa, Homo sapiens
FASSK

SEQ ID NO: 1403 - protein, 7 aa, Homo sapiens
FASTFDK

SEQ ID NO: 1404 - protein, 13 aa, Homo sapiens
FATTFYQHLADSK

SEQ ID NO: 1405 - protein, 34 aa, Homo sapiens
FATTFYQHLADSKNDNDNIFLSPLSISTAFAMTK

SEQ ID NO: 1406 - protein, 10 aa, Homo sapiens
FCENPDEVKR

SEQ ID NO: 1407 - protein, 15 aa, Homo sapiens
FCGQLGSPLGNPPGK

SEQ ID NO: 1408 - protein, 16 aa, Homo sapiens
FCGQLGSPLGNPPGKK

SEQ ID NO: 1409 - protein, 15 aa, Homo sapiens
FDEFFSEGCAPGSKK

SEQ ID NO: 1410 - protein, 15 aa, Homo sapiens
FDEHQSKPEILNLVK

SEQ ID NO: 1411 - protein, 6 aa, Homo sapiens
FDESEK

SEQ ID NO: 1412 - protein, 19 aa, Homo sapiens
FDHTNSLNIAGLSLDFSSK

SEQ ID NO: 1413 - protein, 15 aa, Homo sapiens
FDHVITNMNNNYEPR

SEQ ID NO: 1414 - protein, 6 aa, Homo sapiens
FDLEVK

SEQ ID NO: 1415 - protein, 5 aa, Homo sapiens
FDPAK

SEQ ID NO: 1416 - protein, 39 aa, Homo sapiens
FDPAKLDQIESVITATSANTQLVLETLAQMDDLQDFLSK

SEQ ID NO: 1417 - protein, 8 aa, Homo sapiens
FDPSLTQR

SEQ ID NO: 1418 - protein, 5 aa, Homo sapiens
FDPVR

SEQ ID NO: 1419 - protein, 11 aa, Homo sapiens
FDPVRGEVPPR

SEQ ID NO: 1420 - protein, 7 aa, Homo sapiens
FDTISEK

SEQ ID NO: 1421 - protein, 32 aa, Homo sapiens
FDVSSFNPHGISTFTDEDNAMYLLVVNHPDAK

SEQ ID NO: 1422 - protein, 9 aa, Homo sapiens
FEDENFILK

SEQ ID NO: 1423 - protein, 12 aa, Homo sapiens
FEDGVLDPDYPR

SEQ ID NO: 1424 - protein, 6 aa, Homo sapiens
FEEQQK

SEQ ID NO: 1425 - protein, 10 aa, Homo sapiens
FEGIACEISK

SEQ ID NO: 1426 - protein, 17 aa, Homo sapiens
FEGNCAEQDGSGWWMNK

SEQ ID NO: 1427 - protein, 16 aa, Homo sapiens
FEQLELRPVLYNYLDK

SEQ ID NO: 1428 - protein, 7 aa, Homo sapiens
FERDQEK

SEQ ID NO: 1429 - protein, 9 aa, Homo sapiens
FETVHQIHK

SEQ ID NO: 1430 - protein, 9 aa, Homo sapiens
FEVQVTVPK

SEQ ID NO: 1431 - protein, 19 aa, Homo sapiens
FFESFGDLSTPDAVMGNPK

SEQ ID NO: 1432 - protein, 7 aa, Homo sapiens
FFGEGTK

SEQ ID NO: 1433 - protein, 8 aa, Homo sapiens
FFGEGTKK

SEQ ID NO: 1434 - protein, 20 aa, Homo sapiens
FFGHGAEDSLADQAANEWGR

SEQ ID NO: 1435 - protein, 10 aa, Homo sapiens
FFHKNEIWYR

SEQ ID NO: 1436 - protein, 9 aa, Homo sapiens
FFLSHPAYR

SEQ ID NO: 1437 - protein, 13 aa, Homo sapiens
FFLTNGEIMTFEK

SEQ ID NO: 1438 - protein, 12 aa, Homo sapiens
FFNVLTTNTDGK

SEQ ID NO: 1439 - protein, 23 aa, Homo sapiens
FFNVLTTNTDGKIEFISTMEGYK

SEQ ID NO: 1440 - protein, 8 aa, Homo sapiens
FFSAQTNR

SEQ ID NO: 1441 - protein, 20 aa, Homo sapiens
FFTREPQDTYHYLPFSLPHR

SEQ ID NO: 1442 - protein, 19 aa, Homo sapiens
FFTSHNGMQFSTWDNDNDK

SEQ ID NO: 1443 - protein, 36 aa, Homo sapiens
FFTSHNGMQFSTWDNDNDKFEGNCAEQDGSGWWMNK

SEQ ID NO: 1444 - protein, 8 aa, Homo sapiens
FFVGGNWK

SEQ ID NO: 1445 - protein, 21 aa, Homo sapiens
FGAVFLWDSGSSVGEITGHNK

SEQ ID NO: 1446 - protein, 6 aa, Homo sapiens
FGCFLK

SEQ ID NO: 1447 - protein, 5 aa, Homo sapiens
FGGGK

SEQ ID NO: 1448 - protein, 8 aa, Homo sapiens
FGGLEGLK

SEQ ID NO: 1449 - protein, 25 aa, Homo sapiens
FGGVLHLSDLDDDGLDEIIMAAPLR

SEQ ID NO: 1450 - protein, 12 aa, Homo sapiens
FGHTLVNPLLYR

SEQ ID NO: 1451 - protein, 9 aa, Homo sapiens
FGLFAPIHK

SEQ ID NO: 1452 - protein, 15 aa, Homo sapiens
FGLFKPGEIAPLLFR

SEQ ID NO: 1453 - protein, 9 aa, Homo sapiens
FGLLDEDGK

SEQ ID NO: 1454 - protein, 10 aa, Homo sapiens
FGLLDEDGKK

SEQ ID NO: 1455 - protein, 11 aa, Homo sapiens
FGMHLQAATPK

SEQ ID NO: 1456 - protein, 10 aa, Homo sapiens
FGPVVAPKPK

SEQ ID NO: 1457 - protein, 18 aa, Homo sapiens
FGQGAHHAAGQAGNEAGR

SEQ ID NO: 1458 - protein, 18 aa, Homo sapiens
FGQGVHHAAGQAGNEAGR

SEQ ID NO: 1459 - protein, 14 aa, Homo sapiens
FGQGVHHTAGQVGK

SEQ ID NO: 1460 - protein, 9 aa, Homo sapiens
FGQTPVQER

SEQ ID NO: 1461 - protein, 11 aa, Homo sapiens
FGSGYVSGWGR

SEQ ID NO: 1462 - protein, 5 aa, Homo sapiens
FGSPK

SEQ ID NO: 1463 - protein, 9 aa, Homo sapiens
FGSSLITVR

SEQ ID NO: 1464 - protein, 19 aa, Homo sapiens
FGVPSPSTLEPHPRPLLQR

SEQ ID NO: 1465 - protein, 17 aa, Homo sapiens
FHDFLGDSWGILFSHPR

SEQ ID NO: 1466 - protein, 11 aa, Homo sapiens
FHHTFSTEIAK

SEQ ID NO: 1467 - protein, 6 aa, Homo sapiens
FHILFK

SEQ ID NO: 1468 - protein, 11 aa, Homo sapiens
FHIPSSVPYIR

SEQ ID NO: 1469 - protein, 7 aa, Homo sapiens
FHPLHSK

SEQ ID NO: 1470 - protein, 13 aa, Homo sapiens
FHSFPNVYHELSK

SEQ ID NO: 1471 - protein, 8 aa, Homo sapiens
FHVEEEGK

SEQ ID NO: 1472 - protein, 11 aa, Homo sapiens
FHVPNVTPYIR

SEQ ID NO: 1473 - protein, 6 aa, Homo sapiens
FIAESK

SEQ ID NO: 1474 - protein, 15 aa, Homo sapiens
FICPLTGLWPINTLK

SEQ ID NO: 1475 - protein, 6 aa, Homo sapiens
FIEDVK

SEQ ID NO: 1476 - protein, 20 aa, Homo sapiens
FIIEGMEEAGSVALEELVEK

SEQ ID NO: 1477 - protein, 22 aa, Homo sapiens
FIIEGMEEAGSVALEELVEKEK

SEQ ID NO: 1478 - protein, 7 aa, Homo sapiens
FIIPGLK

SEQ ID NO: 1479 - protein, 8 aa, Homo sapiens
FIIPNVVK

SEQ ID NO: 1480 - protein, 8 aa, Homo sapiens
FIIPQIVK

SEQ ID NO: 1481 - protein, 7 aa, Homo sapiens
FIIPSPK

SEQ ID NO: 1482 - protein, 5 aa, Homo sapiens
FILSR

SEQ ID NO: 1483 - protein, 27 aa, Homo sapiens
FINDYGTHYITSGSMGGIYEYILVIDK

SEQ ID NO: 1484 - protein, 29 aa, Homo sapiens
FINDYGTHYITSGSMGGIYEYILVIDKAK

SEQ ID NO: 1485 - protein, 16 aa, Homo sapiens
FIQVGVISWGVVDVCK

SEQ ID NO: 1486 - protein, 8 aa, Homo sapiens
FITIFGTR

SEQ ID NO: 1487 - protein, 14 aa, Homo sapiens
FIYVAIAQFIETTK

SEQ ID NO: 1488 - protein, 10 aa, Homo sapiens
FKDLGEENFK

SEQ ID NO: 1489 - protein, 9 aa, Homo sapiens
FKKPQSLTK

SEQ ID NO: 1490 - protein, 20 aa, Homo sapiens
FKLDDDLEHQGGHVLDHGHK

SEQ ID NO: 1491 - protein, 6 aa, Homo sapiens
FKLDQK

SEQ ID NO: 1492 - protein, 5 aa, Homo sapiens
FKLEK

SEQ ID NO: 1493 - protein, 10 aa, Homo sapiens
FKNGMLHGDK

SEQ ID NO: 1494 - protein, 8 aa, Homo sapiens
FKNSLLQK

SEQ ID NO: 1495 - protein, 10 aa, Homo sapiens
FKPQSLPDHK

SEQ ID NO: 1496 - protein, 10 aa, Homo sapiens
FKPTLSQQQK

SEQ ID NO: 1497 - protein, 8 aa, Homo sapiens
FKTGTTLK

SEQ ID NO: 1498 - protein, 5 aa, Homo sapiens
FLAEK

SEQ ID NO: 1499 - protein, 12 aa, Homo sapiens
FLASVSTVLTSK

SEQ ID NO: 1500 - protein, 17 aa, Homo sapiens
FLATTPNSLLVSWQPPR

SEQ ID NO: 1501 - protein, 7 aa, Homo sapiens
FLDSNIK

SEQ ID NO: 1502 - protein, 6 aa, Homo sapiens
FLEDVK

SEQ ID NO: 1503 - protein, 7 aa, Homo sapiens
FLEDVKK

SEQ ID NO: 1504 - protein, 7 aa, Homo sapiens
FLENEDR

SEQ ID NO: 1505 - protein, 8 aa, Homo sapiens
FLENEDRR

SEQ ID NO: 1506 - protein, 8 aa, Homo sapiens
FLENLLEK

SEQ ID NO: 1507 - protein, 27 aa, Homo sapiens
FLEPFDIDDHQQVHCPYDQLQIYANGK

SEQ ID NO: 1508 - protein, 12 aa, Homo sapiens
FLEQQNQVLQTK

SEQ ID NO: 1509 - protein, 6 aa, Homo sapiens
FLFDTK

SEQ ID NO: 1510 - protein, 15 aa, Homo sapiens
FLFDTKEEILMHLWR

SEQ ID NO: 1511 - protein, 5 aa, Homo sapiens
FLFSR

SEQ ID NO: 1512 - protein, 13 aa, Homo sapiens
FLGTHWLMGNILR

SEQ ID NO: 1513 - protein, 13 aa, Homo sapiens
FLGVTQFSPTHAR

SEQ ID NO: 1514 - protein, 13 aa, Homo sapiens
FLHQDIDSGQGIR

SEQ ID NO: 1515 - protein, 20 aa, Homo sapiens
FLHVPDTFEGHFDGVPVISK

SEQ ID NO: 1516 - protein, 10 aa, Homo sapiens
FLIATGERPR

SEQ ID NO: 1517 - protein, 12 aa, Homo sapiens
FLIPNASQAESK

SEQ ID NO: 1518 - protein, 5 aa, Homo sapiens
FLISR

SEQ ID NO: 1519 - protein, 8 aa, Homo sapiens
FLIVGPQK

SEQ ID NO: 1520 - protein, 11 aa, Homo sapiens
FLLFGIQDGKR

SEQ ID NO: 1521 - protein, 17 aa, Homo sapiens
FLLKAEPLAFTFSHDYK

SEQ ID NO: 1522 - protein, 11 aa, Homo sapiens
FLLMSGGKPSR

SEQ ID NO: 1523 - protein, 6 aa, Homo sapiens
FLLQAR

SEQ ID NO: 1524 - protein, 8 aa, Homo sapiens
FLLQSGLK

SEQ ID NO: 1525 - protein, 5 aa, Homo sapiens
FLLSR

SEQ ID NO: 1526 - protein, 10 aa, Homo sapiens
FLLYGLHEGK

SEQ ID NO: 1527 - protein, 11 aa, Homo sapiens
FLLYGLHEGKR

SEQ ID NO: 1528 - protein, 9 aa, Homo sapiens
FLLYGLSGR

SEQ ID NO: 1529 - protein, 6 aa, Homo sapiens
FLNDVK

SEQ ID NO: 1530 - protein, 8 aa, Homo sapiens
FLNVLSPR

SEQ ID NO: 1531 - protein, 6 aa, Homo sapiens
FLNWIK

SEQ ID NO: 1532 - protein, 5 aa, Homo sapiens
FLPFK

SEQ ID NO: 1533 - protein, 11 aa, Homo sapiens
FLQDYFDGNLK

SEQ ID NO: 1534 - protein, 8 aa, Homo sapiens
FLQEQGHR

SEQ ID NO: 1535 - protein, 7 aa, Homo sapiens
FLQSFAR

SEQ ID NO: 1536 - protein, 8 aa, Homo sapiens
FLVALISR

SEQ ID NO: 1537 - protein, 7 aa, Homo sapiens
FLVNLVK

SEQ ID NO: 1538 - protein, 8 aa, Homo sapiens
FLVSLALR

SEQ ID NO: 1539 - protein, 5 aa, Homo sapiens
FLYHK

SEQ ID NO: 1540 - protein, 8 aa, Homo sapiens
FMETVAEK

SEQ ID NO: 1541 - protein, 9 aa, Homo sapiens
FMQAVTGWK

SEQ ID NO: 1542 - protein, 8 aa, Homo sapiens
FNALQYLR

SEQ ID NO: 1543 - protein, 18 aa, Homo sapiens
FNAVLTNPQGDYDTSTGK

SEQ ID NO: 1544 - protein, 23 aa, Homo sapiens
FNEEHIPDSPFVVPVASPSGDAR

SEQ ID NO: 1545 - protein, 7 aa, Homo sapiens
FNEEVKK

SEQ ID NO: 1546 - protein, 12 aa, Homo sapiens
FNGTHIPGSPFK

SEQ ID NO: 1547 - protein, 24 aa, Homo sapiens
FNHLGHIFTFTPQNNEFQLQLSPK

SEQ ID NO: 1548 - protein, 19 aa, Homo sapiens
FNKNNEGTYYSPNYNPQSR

SEQ ID NO: 1549 - protein, 15 aa, Homo sapiens
FNKPFVFLMIEQNTK

SEQ ID NO: 1550 - protein, 22 aa, Homo sapiens
FNKPFVFLMIEQNTKSPLFMGK

SEQ ID NO: 1551 - protein, 20 aa, Homo sapiens
FNLTETSEAEIHQSFQHLLR

SEQ ID NO: 1552 - protein, 22 aa, Homo sapiens
FNRPFLMIIVPTDTQNIFFMSK

SEQ ID NO: 1553 - protein, 27 aa, Homo sapiens
FNRPFLMIIVPTDTQNIFFMSKVTNPK

SEQ ID NO: 1554 - protein, 13 aa, Homo sapiens
FNTANDDNVTQVR

SEQ ID NO: 1555 - protein, 13 aa, Homo sapiens
FNTFIHEDIWNIR

SEQ ID NO: 1556 - protein, 10 aa, Homo sapiens
FPAIQNLALR

SEQ ID NO: 1557 - protein, 8 aa, Homo sapiens
FPCGRPWK

SEQ ID NO: 1558 - protein, 9 aa, Homo sapiens
FPEVDVLTK

SEQ ID NO: 1559 - protein, 8 aa, Homo sapiens
FPFLFNGK

SEQ ID NO: 1560 - protein, 8 aa, Homo sapiens
FPHLFTGK

SEQ ID NO: 1561 - protein, 27 aa, Homo sapiens
FPLYNLGFGHNVDFNFLEVMSMENNGR

SEQ ID NO: 1562 - protein, 29 aa, Homo sapiens
FPLYNLGFGNNLNYNFLENMALENHGFAR

SEQ ID NO: 1563 - protein, 14 aa, Homo sapiens
FPSGTFEQVSQLVK

SEQ ID NO: 1564 - protein, 14 aa, Homo sapiens
FPSSQDHPLPSAER

SEQ ID NO: 1565 - protein, 12 aa, Homo sapiens
FPVEMTHNHNFR

SEQ ID NO: 1566 - protein, 7 aa, Homo sapiens
FPVFMGR

SEQ ID NO: 1567 - protein, 8 aa, Homo sapiens
FPVIQHFK

SEQ ID NO: 1568 - protein, 9 aa, Homo sapiens
FQASVATPR

SEQ ID NO: 1569 - protein, 9 aa, Homo sapiens
FQDLVDAVR

SEQ ID NO: 1570 - protein, 7 aa, Homo sapiens
FQDTDGK

SEQ ID NO: 1571 - protein, 6 aa, Homo sapiens
FQEEEK

SEQ ID NO: 1572 - protein, 9 aa, Homo sapiens
FQEGQEEER

SEQ ID NO: 1573 - protein, 5 aa, Homo sapiens
FQFIK

SEQ ID NO: 1574 - protein, 12 aa, Homo sapiens
FQFPGKPGIYTR

SEQ ID NO: 1575 - protein, 8 aa, Homo sapiens
FQGAGSNK

SEQ ID NO: 1576 - protein, 24 aa, Homo sapiens
FQILTLWLPDSLTTWEIHGLSLSK

SEQ ID NO: 1577 - protein, 8 aa, Homo sapiens
FQNALLVR

SEQ ID NO: 1578 - protein, 12 aa, Homo sapiens
FQNSAILTIQPK

SEQ ID NO: 1579 - protein, 10 aa, Homo sapiens
FQPTLLTLPR

SEQ ID NO: 1580 - protein, 8 aa, Homo sapiens
FQSHIIIR

SEQ ID NO: 1581 - protein, 9 aa, Homo sapiens
FQSVFTVTR

SEQ ID NO: 1582 - protein, 8 aa, Homo sapiens
FQVDNNNR

SEQ ID NO: 1583 - protein, 9 aa, Homo sapiens
FRETLEDTR

SEQ ID NO: 1584 - protein, 10 aa, Homo sapiens
FRIEDGFSLK

SEQ ID NO: 1585 - protein, 8 aa, Homo sapiens
FRLPEISR

SEQ ID NO: 1586 - protein, 8 aa, Homo sapiens
FRPDGLPK

SEQ ID NO: 1587 - protein, 10 aa, Homo sapiens
FRPFQFGSAK

SEQ ID NO: 1588 - protein, 8 aa, Homo sapiens
FRPTLVFR

SEQ ID NO: 1589 - protein, 8 aa, Homo sapiens
FSAEFDFR

SEQ ID NO: 1590 - protein, 14 aa, Homo sapiens
FSAICQGDGTWSPR

SEQ ID NO: 1591 - protein, 14 aa, Homo sapiens
FSASLAPHFNSLPR

SEQ ID NO: 1592 - protein, 16 aa, Homo sapiens
FSCFQEEAPQPHYQLR

SEQ ID NO: 1593 - protein, 27 aa, Homo sapiens
FSDEGTHESQISFTIEGPLTSFGLSNK

SEQ ID NO: 1594 - protein, 16 aa, Homo sapiens
FSDGLESNSSTQFEVK

SEQ ID NO: 1595 - protein, 6 aa, Homo sapiens
FSEHIK

SEQ ID NO: 1596 - protein, 16 aa, Homo sapiens
FSEWGNNAFFYYFEHR

SEQ ID NO: 1597 - protein, 16 aa, Homo sapiens
FSGQLNSHGCFYQQVK

SEQ ID NO: 1598 - protein, 5 aa, Homo sapiens
FSGSK

SEQ ID NO: 1599 - protein, 10 aa, Homo sapiens
FSGTWYAMAK

SEQ ID NO: 1600 - protein, 18 aa, Homo sapiens
FSGWYDADLSPAGHEEAK

SEQ ID NO: 1601 - protein, 15 aa, Homo sapiens
FSHEEIAMATVTALR

SEQ ID NO: 1602 - protein, 16 aa, Homo sapiens
FSHEEIAMATVTALRR

SEQ ID NO: 1603 - protein, 5 aa, Homo sapiens
FSHTK

SEQ ID NO: 1604 - protein, 12 aa, Homo sapiens
FSHTKSVFLHAR

SEQ ID NO: 1605 - protein, 6 aa, Homo sapiens
FSHVEK

SEQ ID NO: 1606 - protein, 11 aa, Homo sapiens
FSIEGSYQLEK

SEQ ID NO: 1607 - protein, 15 aa, Homo sapiens
FSISATYDLGATLLK

SEQ ID NO: 1608 - protein, 5 aa, Homo sapiens
FSISR

SEQ ID NO: 1609 - protein, 6 aa, Homo sapiens
FSLDGK

SEQ ID NO: 1610 - protein, 9 aa, Homo sapiens
FSLFTAVHK

SEQ ID NO: 1611 - protein, 5 aa, Homo sapiens
FSLSR

SEQ ID NO: 1612 - protein, 17 aa, Homo sapiens
FSPATHPSEGLEENYCR

SEQ ID NO: 1613 - protein, 7 aa, Homo sapiens
FSPENTR

SEQ ID NO: 1614 - protein, 8 aa, Homo sapiens
FSPENTRK

SEQ ID NO: 1615 - protein, 7 aa, Homo sapiens
FSSHGCK

SEQ ID NO: 1616 - protein, 28 aa, Homo sapiens
FSSHVGGTLGQFYQEVLWGSPAASDDGR

SEQ ID NO: 1617 - protein, 29 aa, Homo sapiens
FSSHVGGTLGQFYQEVLWGSPAASDDGRR

SEQ ID NO: 1618 - protein, 19 aa, Homo sapiens
FSSLYISQFIIMYSLDGKK

SEQ ID NO: 1619 - protein, 13 aa, Homo sapiens
FSSSSGYGGGSSR

SEQ ID NO: 1620 - protein, 14 aa, Homo sapiens
FSTEYELQQLEQFK

SEQ ID NO: 1621 - protein, 15 aa, Homo sapiens
FSTEYELQQLEQFKK

SEQ ID NO: 1622 - protein, 13 aa, Homo sapiens
FSTFAGFLLFETK

SEQ ID NO: 1623 - protein, 14 aa, Homo sapiens
FSTFLSLLEAADLK

SEQ ID NO: 1624 - protein, 18 aa, Homo sapiens
FSTVAGESGSADTVRDPR

SEQ ID NO: 1625 - protein, 10 aa, Homo sapiens
FSVLLLHGIR

SEQ ID NO: 1626 - protein, 6 aa, Homo sapiens
FSVSLK

SEQ ID NO: 1627 - protein, 7 aa, Homo sapiens
FSVVYAK

SEQ ID NO: 1628 - protein, 15 aa, Homo sapiens
FSYSSGHVHLSSENK

SEQ ID NO: 1629 - protein, 6 aa, Homo sapiens
FTADQK

SEQ ID NO: 1630 - protein, 6 aa, Homo sapiens
FTDHLK

SEQ ID NO: 1631 - protein, 6 aa, Homo sapiens
FTEDAK

SEQ ID NO: 1632 - protein, 7 aa, Homo sapiens
FTEDAKR

SEQ ID NO: 1633 - protein, 7 aa, Homo sapiens
FTFEYSR

SEQ ID NO: 1634 - protein, 18 aa, Homo sapiens
FTGSQPFGQGVEHATANK

SEQ ID NO: 1635 - protein, 5 aa, Homo sapiens
FTISR

SEQ ID NO: 1636 - protein, 14 aa, Homo sapiens
FTKETYDFDIAVLR

SEQ ID NO: 1637 - protein, 10 aa, Homo sapiens
FTLVVPHQHR

SEQ ID NO: 1638 - protein, 10 aa, Homo sapiens
FTNIGPDTMR

SEQ ID NO: 1639 - protein, 5 aa, Homo sapiens
FTPEK

SEQ ID NO: 1640 - protein, 8 aa, Homo sapiens
FTPTETNK

SEQ ID NO: 1641 - protein, 7 aa, Homo sapiens
FTPVASK

SEQ ID NO: 1642 - protein, 24 aa, Homo sapiens
FTQVTPTSLSAQWTPPNVQLTGYR

SEQ ID NO: 1643 - protein, 7 aa, Homo sapiens
FTRPLFK

SEQ ID NO: 1644 - protein, 15 aa, Homo sapiens
FTVDRPFLFLIYEHR

SEQ ID NO: 1645 - protein, 8 aa, Homo sapiens
FTVETPDK

SEQ ID NO: 1646 - protein, 12 aa, Homo sapiens
FTVSVNVAAGSK

SEQ ID NO: 1647 - protein, 11 aa, Homo sapiens
FTVVAISPPRK

SEQ ID NO: 1648 - protein, 8 aa, Homo sapiens
FVASPLAK

SEQ ID NO: 1649 - protein, 8 aa, Homo sapiens
FVCNSGYK

SEQ ID NO: 1650 - protein, 11 aa, Homo sapiens
FVFDRPLPVSR

SEQ ID NO: 1651 - protein, 10 aa, Homo sapiens
FVLHAVQLVK

SEQ ID NO: 1652 - protein, 7 aa, Homo sapiens
FVLSSGK

SEQ ID NO: 1653 - protein, 5 aa, Homo sapiens
FVQGK

SEQ ID NO: 1654 - protein, 15 aa, Homo sapiens
FVSDYETHGAGFSIR

SEQ ID NO: 1655 - protein, 9 aa, Homo sapiens
FVTQAEGAK

SEQ ID NO: 1656 - protein, 5 aa, Homo sapiens
FVTQK

SEQ ID NO: 1657 - protein, 15 aa, Homo sapiens
FVTVQATFGTQVVEK

SEQ ID NO: 1658 - protein, 10 aa, Homo sapiens
FVTWIEGVMR

SEQ ID NO: 1659 - protein, 10 aa, Homo sapiens
FVYHLSDLCK

SEQ ID NO: 1660 - protein, 11 aa, Homo sapiens
FVYHLSDLCKK

SEQ ID NO: 1661 - protein, 13 aa, Homo sapiens
FVYPVPYTTRPPR

SEQ ID NO: 1662 - protein, 6 aa, Homo sapiens
FWDYLR

SEQ ID NO: 1663 - protein, 8 aa, Homo sapiens
FWTSFFPK

SEQ ID NO: 1664 - protein, 14 aa, Homo sapiens
FYALSASFEPFSNK

SEQ ID NO: 1665 - protein, 10 aa, Homo sapiens
FYEEVHDLER

SEQ ID NO: 1666 - protein, 7 aa, Homo sapiens
FYGDEEK

SEQ ID NO: 1667 - protein, 9 aa, Homo sapiens
FYGDEEKDK

SEQ ID NO: 1668 - protein, 5 aa, Homo sapiens
FYGNR

SEQ ID NO: 1669 - protein, 5 aa, Homo sapiens
FYISK

SEQ ID NO: 1670 - protein, 5 aa, Homo sapiens
FYLSK

SEQ ID NO: 1671 - protein, 11 aa, Homo sapiens
FYNQVSTPLLR

SEQ ID NO: 1672 - protein, 5 aa, Homo sapiens
FYSEK

SEQ ID NO: 1673 - protein, 6 aa, Homo sapiens
FYTFLK

SEQ ID NO: 1674 - protein, 8 aa, Homo sapiens
FYYIYNEK

SEQ ID NO: 1675 - protein, 17 aa, Homo sapiens
FYYIYNEKGLEVTITAR

SEQ ID NO: 1676 - protein, 12 aa, Homo sapiens
FYYLIASETPGK

SEQ ID NO: 1677 - protein, 14 aa, Homo sapiens
GAAVSNNIVVRPSR

SEQ ID NO: 1678 - protein, 7 aa, Homo sapiens
GADLSLR

SEQ ID NO: 1679 - protein, 7 aa, Homo sapiens
GADVWFK

SEQ ID NO: 1680 - protein, 7 aa, Homo sapiens
GADYSLR

SEQ ID NO: 1681 - protein, 7 aa, Homo sapiens
GAEFLLR

SEQ ID NO: 1682 - protein, 14 aa, Homo sapiens
GAFQQAAQILLHAR

SEQ ID NO: 1683 - protein, 16 aa, Homo sapiens
GAGAFGYFEVTHDITK

SEQ ID NO: 1684 - protein, 20 aa, Homo sapiens
GAGHMVPTDKPLAAFTMFSR

SEQ ID NO: 1685 - protein, 18 aa, Homo sapiens
GAGTGGLGLAVEGPSEAK

SEQ ID NO: 1686 - protein, 9 aa, Homo sapiens
GAHVTINAR

SEQ ID NO: 1687 - protein, 8 aa, Homo sapiens
GALALEEK

SEQ ID NO: 1688 - protein, 7 aa, Homo sapiens
GALHNYK

SEQ ID NO: 1689 - protein, 15 aa, Homo sapiens
GALQNIIPASTGAAK

SEQ ID NO: 1690 - protein, 6 aa, Homo sapiens
GAPLAK

SEQ ID NO: 1691 - protein, 10 aa, Homo sapiens
GASAYFLFLR

SEQ ID NO: 1692 - protein, 11 aa, Homo sapiens
GASQAGAPQGR

SEQ ID NO: 1693 - protein, 20 aa, Homo sapiens
GATDNKGPVLAWINAVSAFR

SEQ ID NO: 1694 - protein, 14 aa, Homo sapiens
GATTSPGVYELSSR

SEQ ID NO: 1695 - protein, 12 aa, Homo sapiens
GATYNIIVEALK

SEQ ID NO: 1696 - protein, 16 aa, Homo sapiens
GATYNIIVEALKDQQR

SEQ ID NO: 1697 - protein, 22 aa, Homo sapiens
GAVHVVVAETDYQSFAVLYLER

SEQ ID NO: 1698 - protein, 10 aa, Homo sapiens
GAVYVYFGSK

SEQ ID NO: 1699 - protein, 13 aa, Homo sapiens
GAYPLSIEPIGVR

SEQ ID NO: 1700 - protein, 9 aa, Homo sapiens
GAYQNNEIK

SEQ ID NO: 1701 - protein, 24 aa, Homo sapiens
GAYQNNEIKHIYAISSAALSASYK

SEQ ID NO: 1702 - protein, 15 aa, Homo sapiens
GDACEGDSGGPFVMK

SEQ ID NO: 1703 - protein, 14 aa, Homo sapiens
GDATVFFILPNQGK

SEQ ID NO: 1704 - protein, 19 aa, Homo sapiens
GDAVCTESGWRPLPSCEEK

SEQ ID NO: 1705 - protein, 15 aa, Homo sapiens
GDDITMVLILPKPEK

SEQ ID NO: 1706 - protein, 15 aa, Homo sapiens
GDDTPLHLAASHGHR

SEQ ID NO: 1707 - protein, 13 aa, Homo sapiens
GDELADSALEIFK

SEQ ID NO: 1708 - protein, 9 aa, Homo sapiens
GDFSSANNR

SEQ ID NO: 1709 - protein, 15 aa, Homo sapiens
GDFSSANNRDNTYNR

SEQ ID NO: 1710 - protein, 14 aa, Homo sapiens
GDGPVQGIINFEQK

SEQ ID NO: 1711 - protein, 22 aa, Homo sapiens
GDGTFVDAAASAGVDDPHQHGR

SEQ ID NO: 1712 - protein, 6 aa, Homo sapiens
GDILQR

SEQ ID NO: 1713 - protein, 11 aa, Homo sapiens
GDKVWVYPPEK

SEQ ID NO: 1714 - protein, 11 aa, Homo sapiens
GDLGIEIPAEK

SEQ ID NO: 1715 - protein, 11 aa, Homo sapiens
GDLYFANVEEK

SEQ ID NO: 1716 - protein, 12 aa, Homo sapiens
GDMFLVANLGTK

SEQ ID NO: 1717 - protein, 19 aa, Homo sapiens
GDSFTHTPPLDPQELDILK

SEQ ID NO: 1718 - protein, 15 aa, Homo sapiens
GDSGGAFAVQDPNDK

SEQ ID NO: 1719 - protein, 11 aa, Homo sapiens
GDSGGPLIVHK

SEQ ID NO: 1720 - protein, 12 aa, Homo sapiens
GDSGGPLIVHKR

SEQ ID NO: 1721 - protein, 15 aa, Homo sapiens
GDSPASSKPISINYR

SEQ ID NO: 1722 - protein, 37 aa, Homo sapiens
GDSPASSKPISINYRTEIDKPSQMQVTDVQDNSISVK

SEQ ID NO: 1723 - protein, 8 aa, Homo sapiens
GDSQSSWK

SEQ ID NO: 1724 - protein, 8 aa, Homo sapiens
GDSTFESK

SEQ ID NO: 1725 - protein, 30 aa, Homo sapiens
GDSVVWYLFSAGNEADVHGIYFSGNTYLWR

SEQ ID NO: 1726 - protein, 7 aa, Homo sapiens
GDVAFVK

SEQ ID NO: 1727 - protein, 18 aa, Homo sapiens
GDVAFVKHQTVPQNTGGK

SEQ ID NO: 1728 - protein, 10 aa, Homo sapiens
GDYDAFFEAR

SEQ ID NO: 1729 - protein, 9 aa, Homo sapiens
GDYPLEAVR

SEQ ID NO: 1730 - protein, 13 aa, Homo sapiens
GDYTLNNVHACAK

SEQ ID NO: 1731 - protein, 7 aa, Homo sapiens
GEAFTLK

SEQ ID NO: 1732 - protein, 16 aa, Homo sapiens
GEAFTLKATVLNYLPK

SEQ ID NO: 1733 - protein, 6 aa, Homo sapiens
GEFVWK

SEQ ID NO: 1734 - protein, 8 aa, Homo sapiens
GEFYIGSK

SEQ ID NO: 1735 - protein, 7 aa, Homo sapiens
GEIFFFK

SEQ ID NO: 1736 - protein, 7 aa, Homo sapiens
GEIHLGR

SEQ ID NO: 1737 - protein, 9 aa, Homo sapiens
GEIQNILQK

SEQ ID NO: 1738 - protein, 7 aa, Homo sapiens
GELFFFK

SEQ ID NO: 1739 - protein, 8 aa, Homo sapiens
GELLEAIK

SEQ ID NO: 1740 - protein, 9 aa, Homo sapiens
GELLEAIKR

SEQ ID NO: 1741 - protein, 8 aa, Homo sapiens
GELSARMK

SEQ ID NO: 1742 - protein, 17 aa, Homo sapiens
GEMMDLQHGSLFLQTPK

SEQ ID NO: 1743 - protein, 9 aa, Homo sapiens
GENALKDAK

SEQ ID NO: 1744 - protein, 25 aa, Homo sapiens
GENLFAITDEGMDVPLAMEEWHHER

SEQ ID NO: 1745 - protein, 6 aa, Homo sapiens
GEPFIR

SEQ ID NO: 1746 - protein, 11 aa, Homo sapiens
GEPGDPVNLLR

SEQ ID NO: 1747 - protein, 8 aa, Homo sapiens
GEPSLPEK

SEQ ID NO: 1748 - protein, 13 aa, Homo sapiens
GEPTDRYVGFCMK

SEQ ID NO: 1749 - protein, 7 aa, Homo sapiens
GEQIQLK

SEQ ID NO: 1750 - protein, 11 aa, Homo sapiens
GESGGAVFLER

SEQ ID NO: 1751 - protein, 19 aa, Homo sapiens
GESGYVASEGFPNLYPPNK

SEQ ID NO: 1752 - protein, 22 aa, Homo sapiens
GESKLEVLNFDFQANAQLSNPK

SEQ ID NO: 1753 - protein, 11 aa, Homo sapiens
GESPVDYDGGR

SEQ ID NO: 1754 - protein, 14 aa, Homo sapiens
GETHEQVHSILHFK

SEQ ID NO: 1755 - protein, 7 aa, Homo sapiens
GEVFTLK

SEQ ID NO: 1756 - protein, 14 aa, Homo sapiens
GEVLDNSFTGGICK

SEQ ID NO: 1757 - protein, 20 aa, Homo sapiens
GEVLPLPEANFPSFPLPHHK

SEQ ID NO: 1758 - protein, 6 aa, Homo sapiens
GEVPPR

SEQ ID NO: 1759 - protein, 9 aa, Homo sapiens
GEVPPRYPR

SEQ ID NO: 1760 - protein, 15 aa, Homo sapiens
GEVQAMLGQSTEELR

SEQ ID NO: 1761 - protein, 17 aa, Homo sapiens
GEWPWQVTLHTTSPTQR

SEQ ID NO: 1762 - protein, 12 aa, Homo sapiens
GEWTCIAYSQLR

SEQ ID NO: 1763 - protein, 11 aa, Homo sapiens
GEWTCKPIAEK

SEQ ID NO: 1764 - protein, 10 aa, Homo sapiens
GEWVALNPLR

SEQ ID NO: 1765 - protein, 11 aa, Homo sapiens
GEWVALNPLRK

SEQ ID NO: 1766 - protein, 15 aa, Homo sapiens
GEYEEHLGILGPIIR

SEQ ID NO: 1767 - protein, 32 aa, Homo sapiens
GEYFAFLETYGTHYSSSGSLGGLYELIYVLDK

SEQ ID NO: 1768 - protein, 7 aa, Homo sapiens
GEYFWEK

SEQ ID NO: 1769 - protein, 12 aa, Homo sapiens
GFEPTLEALFGK

SEQ ID NO: 1770 - protein, 13 aa, Homo sapiens
GFFADYEIPNLQK

SEQ ID NO: 1771 - protein, 17 aa, Homo sapiens
GFGGLTGQIVAALSTAK

SEQ ID NO: 1772 - protein, 26 aa, Homo sapiens
GFGGVQVSPPNENVAIHNPFRPWWER

SEQ ID NO: 1773 - protein, 26 aa, Homo sapiens
GFGSLNDEGEGEFWLGNDYLHLLTQR

SEQ ID NO: 1774 - protein, 5 aa, Homo sapiens
GFGYK

SEQ ID NO: 1775 - protein, 13 aa, Homo sapiens
GFGYVVAFRPYGK

SEQ ID NO: 1776 - protein, 9 aa, Homo sapiens
GFIYKPDLK

SEQ ID NO: 1777 - protein, 9 aa, Homo sapiens
GFLLLASLR

SEQ ID NO: 1778 - protein, 9 aa, Homo sapiens
GFLLWYSGR

SEQ ID NO: 1779 - protein, 12 aa, Homo sapiens
GFMQTYYDDHLR

SEQ ID NO: 1780 - protein, 26 aa, Homo sapiens
GFPIKEDFLEQSEQLFGAKPVSLTGK

SEQ ID NO: 1781 - protein, 12 aa, Homo sapiens
GFPTIYFSPANK

SEQ ID NO: 1782 - protein, 13 aa, Homo sapiens
GFPTIYFSPANKK

SEQ ID NO: 1783 - protein, 19 aa, Homo sapiens
GFQHLLHTLNLPGHGLETR

SEQ ID NO: 1784 - protein, 13 aa, Homo sapiens
GFQQLLQELNQPR

SEQ ID NO: 1785 - protein, 13 aa, Homo sapiens
GFQVAPEHHNDHK

SEQ ID NO: 1786 - protein, 9 aa, Homo sapiens
GFQVVVTLR

SEQ ID NO: 1787 - protein, 16 aa, Homo sapiens
GFSLDEATNLNGGLLR

SEQ ID NO: 1788 - protein, 14 aa, Homo sapiens
GFSSGSAVVSGGSR

SEQ ID NO: 1789 - protein, 9 aa, Homo sapiens
GFTIPEAFR

SEQ ID NO: 1790 - protein, 5 aa, Homo sapiens
GFTTK

SEQ ID NO: 1791 - protein, 5 aa, Homo sapiens
GFVLR

SEQ ID NO: 1792 - protein, 9 aa, Homo sapiens
GFVVAGPSR

SEQ ID NO: 1793 - protein, 15 aa, Homo sapiens
GFYFNKPTGYGSSSR

SEQ ID NO: 1794 - protein, 7 aa, Homo sapiens
GGALDIK

SEQ ID NO: 1795 - protein, 36 aa, Homo sapiens
GGASEHITTLAYQELPTADLMQEWGDAVQYNPAIIK

SEQ ID NO: 1796 - protein, 14 aa, Homo sapiens
GGEGTGYFVDFSVR

SEQ ID NO: 1797 - protein, 18 aa, Homo sapiens
GGETAQSADPQWEQLNNK

SEQ ID NO: 1798 - protein, 20 aa, Homo sapiens
GGETSEMYLIQPDSSVKPYR

SEQ ID NO: 1799 - protein, 38 aa, Homo sapiens
GGETSEMYLIQPDSSVKPYRVYCDMNTENGGWTVIQNR

SEQ ID NO: 1800 - protein, 14 aa, Homo sapiens
GGFVLLDGETFEVK

SEQ ID NO: 1801 - protein, 22 aa, Homo sapiens
GGGAGFISGLSYLELDNPAGNK

SEQ ID NO: 1802 - protein, 23 aa, Homo sapiens
GGGAGFISGLSYLELDNPAGNKR

SEQ ID NO: 1803 - protein, 9 aa, Homo sapiens
GGGALLGDR

SEQ ID NO: 1804 - protein, 31 aa, Homo sapiens
GGGGGGYGSGGSSYGSGGGSYGSGGGGGGGR

SEQ ID NO: 1805 - protein, 12 aa, Homo sapiens
GGHSSSLFGNIK

SEQ ID NO: 1806 - protein, 9 aa, Homo sapiens
GGISGYTLR

SEQ ID NO: 1807 - protein, 9 aa, Homo sapiens
GGKIEVQLK

SEQ ID NO: 1808 - protein, 9 aa, Homo sapiens
GGNQLYCVK

SEQ ID NO: 1809 - protein, 9 aa, Homo sapiens
GGPFSDSYR

SEQ ID NO: 1810 - protein, 9 aa, Homo sapiens
GGPLDGTYR

SEQ ID NO: 1811 - protein, 8 aa, Homo sapiens
GGQIMTLK

SEQ ID NO: 1812 - protein, 14 aa, Homo sapiens
GGSASTWLTAFALR

SEQ ID NO: 1813 - protein, 23 aa, Homo sapiens
GGSGGSYGGGGSGGGYGGGSGSR

SEQ ID NO: 1814 - protein, 10 aa, Homo sapiens
GGSIQQYIYK

SEQ ID NO: 1815 - protein, 15 aa, Homo sapiens
GGSISGGGYGSGGGK

SEQ ID NO: 1816 - protein, 16 aa, Homo sapiens
GGSTSYGTGSETESPR

SEQ ID NO: 1817 - protein, 37 aa, Homo sapiens
GGSTSYGTGSETESPRNPSSAGSWNSGSSGPGSTGNR

SEQ ID NO: 1818 - protein, 8 aa, Homo sapiens
GGVASGFK

SEQ ID NO: 1819 - protein, 30 aa, Homo sapiens
GGVEDEVTLSAYITIALLEIPLTVTHPVVR

SEQ ID NO: 1820 - protein, 10 aa, Homo sapiens
GGVVGIKVDK

SEQ ID NO: 1821 - protein, 11 aa, Homo sapiens
GGYTLVSGYPK

SEQ ID NO: 1822 - protein, 12 aa, Homo sapiens
GGYTLVSGYPKR

SEQ ID NO: 1823 - protein, 10 aa, Homo sapiens
GHAYSVTGAK

SEQ ID NO: 1824 - protein, 10 aa, Homo sapiens
GHFSISIPVK

SEQ ID NO: 1825 - protein, 18 aa, Homo sapiens
GHFSISIPVKSDIAPVAR

SEQ ID NO: 1826 - protein, 17 aa, Homo sapiens
GHGATNDLTFTEEVDMK

SEQ ID NO: 1827 - protein, 21 aa, Homo sapiens
GHGATNDLTFTEEVDMKEMEK

SEQ ID NO: 1828 - protein, 19 aa, Homo sapiens
GHGLGHGHEQQHGLGHGHK

SEQ ID NO: 1829 - protein, 13 aa, Homo sapiens
GHGLTALPALPAR

SEQ ID NO: 1830 - protein, 10 aa, Homo sapiens
GHILDHLNLK

SEQ ID NO: 1831 - protein, 22 aa, Homo sapiens
GHIYQGSEADSVFSGFLIFPSA

SEQ ID NO: 1832 - protein, 17 aa, Homo sapiens
GHLFLQTDQPIYNPGQR

SEQ ID NO: 1833 - protein, 10 aa, Homo sapiens
GHMLENHVER

SEQ ID NO: 1834 - protein, 13 aa, Homo sapiens
GHTPTQPGALNQR

SEQ ID NO: 1835 - protein, 13 aa, Homo sapiens
GHVSFKPSLDQQR

SEQ ID NO: 1836 - protein, 17 aa, Homo sapiens
GHYFWMLSPFSPPSPAR

SEQ ID NO: 1837 - protein, 18 aa, Homo sapiens
GHYTEGAELIENVLEVVR

SEQ ID NO: 1838 - protein, 7 aa, Homo sapiens
GHYTIGK

SEQ ID NO: 1839 - protein, 37 aa, Homo sapiens
GIEILNQVQESLPELSNHASILIMLTDGDPTEGVTDR

SEQ ID NO: 1840 - protein, 48 aa, Homo sapiens
GIGEWHCQPLQTYPSSSGPVEVFITETPSQPNSHPIQWNAPQPSHISK

SEQ ID NO: 1841 - protein, 6 aa, Homo sapiens
GIIALR

SEQ ID NO: 1842 - protein, 16 aa, Homo sapiens
GIISALLVPPETEEAK

SEQ ID NO: 1843 - protein, 14 aa, Homo sapiens
GILAADESTGSIAK

SEQ ID NO: 1844 - protein, 6 aa, Homo sapiens
GILALR

SEQ ID NO: 1845 - protein, 8 aa, Homo sapiens
GILGNAIK

SEQ ID NO: 1846 - protein, 7 aa, Homo sapiens
GILNEIK

SEQ ID NO: 1847 - protein, 9 aa, Homo sapiens
GILNEIKDR

SEQ ID NO: 1848 - protein, 20 aa, Homo sapiens
GILSGTSDLLLTFDEAEVRK

SEQ ID NO: 1849 - protein, 6 aa, Homo sapiens
GILTLK

SEQ ID NO: 1850 - protein, 8 aa, Homo sapiens
GILVGESR

SEQ ID NO: 1851 - protein, 5 aa, Homo sapiens
GIPIK

SEQ ID NO: 1852 - protein, 6 aa, Homo sapiens
GIPIKK

SEQ ID NO: 1853 - protein, 5 aa, Homo sapiens
GIPLK

SEQ ID NO: 1854 - protein, 8 aa, Homo sapiens
GIQNDLTK

SEQ ID NO: 1855 - protein, 10 aa, Homo sapiens
GIQSLLNGGR

SEQ ID NO: 1856 - protein, 11 aa, Homo sapiens
GIQVEIYSFPK

SEQ ID NO: 1857 - protein, 37 aa, Homo sapiens
GISEQSLVVSGVQHQSTLELSEVGVEAAAATSIAMSR

SEQ ID NO: 1858 - protein, 7 aa, Homo sapiens
GISMLNK

SEQ ID NO: 1859 - protein, 11 aa, Homo sapiens
GISQEQMNEFR

SEQ ID NO: 1860 - protein, 8 aa, Homo sapiens
GITGVEDK

SEQ ID NO: 1861 - protein, 8 aa, Homo sapiens
GITMATAK

SEQ ID NO: 1862 - protein, 6 aa, Homo sapiens
GITYYK

SEQ ID NO: 1863 - protein, 15 aa, Homo sapiens
GIVAAFYSGPSLSDK

SEQ ID NO: 1864 - protein, 17 aa, Homo sapiens
GIVAAFYSGPSLSDKEK

SEQ ID NO: 1865 - protein, 18 aa, Homo sapiens
GIVDQSQQAYQEAFEISK

SEQ ID NO: 1866 - protein, 8 aa, Homo sapiens
GIYGTISR

SEQ ID NO: 1867 - protein, 11 aa, Homo sapiens
GIYSFNFHVVK

SEQ ID NO: 1868 - protein, 11 aa, Homo sapiens
GIYSFSFHVIK

SEQ ID NO: 1869 - protein, 15 aa, Homo sapiens
GKEESLDSDLYAELR

SEQ ID NO: 1870 - protein, 14 aa, Homo sapiens
GKEGWIHTVCINGR

SEQ ID NO: 1871 - protein, 14 aa, Homo sapiens
GKIEEDSEVLMMIK

SEQ ID NO: 1872 - protein, 8 aa, Homo sapiens
GKITDLIK

SEQ ID NO: 1873 - protein, 8 aa, Homo sapiens
GKIVDLLK

SEQ ID NO: 1874 - protein, 11 aa, Homo sapiens
GKLLIGTVFHK

SEQ ID NO: 1875 - protein, 12 aa, Homo sapiens
GKMNTVIAALSR

SEQ ID NO: 1876 - protein, 14 aa, Homo sapiens
GKTEQQTADQLLAR

SEQ ID NO: 1877 - protein, 25 aa, Homo sapiens
GKVVGLIQDLKPNTIMVLVNYIHFK

SEQ ID NO: 1878 - protein, 10 aa, Homo sapiens
GKWERPFEVK

SEQ ID NO: 1879 - protein, 8 aa, Homo sapiens
GKYEMYLK

SEQ ID NO: 1880 - protein, 11 aa, Homo sapiens
GLAGAVSELLR

SEQ ID NO: 1881 - protein, 15 aa, Homo sapiens
GLASANVDFAFSLYK

SEQ ID NO: 1882 - protein, 23 aa, Homo sapiens
GLASANVDFAFSLYKHLVALSPK

SEQ ID NO: 1883 - protein, 11 aa, Homo sapiens
GLCVATPVQLR

SEQ ID NO: 1884 - protein, 13 aa, Homo sapiens
GLEEELQFSLGSK

SEQ ID NO: 1885 - protein, 7 aa, Homo sapiens
GLESQTK

SEQ ID NO: 1886 - protein, 13 aa, Homo sapiens
GLETSLAECTFTK

SEQ ID NO: 1887 - protein, 9 aa, Homo sapiens
GLEVTITAR

SEQ ID NO: 1888 - protein, 7 aa, Homo sapiens
GLEWVGR

SEQ ID NO: 1889 - protein, 8 aa, Homo sapiens
GLFIIDGK

SEQ ID NO: 1890 - protein, 24 aa, Homo sapiens
GLFQVVSGGMVLQLQQGDQVWVEK

SEQ ID NO: 1891 - protein, 27 aa, Homo sapiens
GLFQVVSGGMVLQLQQGDQVWVEKDPK

SEQ ID NO: 1892 - protein, 12 aa, Homo sapiens
GLGEISAASEFK

SEQ ID NO: 1893 - protein, 11 aa, Homo sapiens
GLGELQELYLK

SEQ ID NO: 1894 - protein, 20 aa, Homo sapiens
GLHLQALKPTKPGLLPSLFK

SEQ ID NO: 1895 - protein, 13 aa, Homo sapiens
GLIDEVNQDFTNR

SEQ ID NO: 1896 - protein, 16 aa, Homo sapiens
GLIDEVNQDFTNRINK

SEQ ID NO: 1897 - protein, 25 aa, Homo sapiens
GLKPGVVYEGQLISIQQYGHQEVTR

SEQ ID NO: 1898 - protein, 13 aa, Homo sapiens
GLKPNAIYLFLVR

SEQ ID NO: 1899 - protein, 6 aa, Homo sapiens
GLLALR

SEQ ID NO: 1900 - protein, 7 aa, Homo sapiens
GLLEPER

SEQ ID NO: 1901 - protein, 10 aa, Homo sapiens
GLLHIFYIPR

SEQ ID NO: 1902 - protein, 24 aa, Homo sapiens
GLLIFDASSSWGPQMSASVHLDSK

SEQ ID NO: 1903 - protein, 8 aa, Homo sapiens
GLLSGWAR

SEQ ID NO: 1904 - protein, 28 aa, Homo sapiens
GLLTQHGIPYTRPTETSNLEHLGHETPR

SEQ ID NO: 1905 - protein, 25 aa, Homo sapiens
GLLVGEILSAVLSQEGINILTHLPK

SEQ ID NO: 1906 - protein, 10 aa, Homo sapiens
GLMAALCPHK

SEQ ID NO: 1907 - protein, 13 aa, Homo sapiens
GLNPLTSYVFHVR

SEQ ID NO: 1908 - protein, 5 aa, Homo sapiens
GLPAK

SEQ ID NO: 1909 - protein, 5 aa, Homo sapiens
GLPLK

SEQ ID NO: 1910 - protein, 6 aa, Homo sapiens
GLPLNK

SEQ ID NO: 1911 - protein, 22 aa, Homo sapiens
GLPPLHIYWMNIELEHIEQDER

SEQ ID NO: 1912 - protein, 9 aa, Homo sapiens
GLQDEDGYR

SEQ ID NO: 1913 - protein, 11 aa, Homo sapiens
GLQVALEEFHK

SEQ ID NO: 1914 - protein, 19 aa, Homo sapiens
GLQYAAQEGLLALQSELLR

SEQ ID NO: 1915 - protein, 6 aa, Homo sapiens
GLSAIR

SEQ ID NO: 1916 - protein, 5 aa, Homo sapiens
GLSYR

SEQ ID NO: 1917 - protein, 13 aa, Homo sapiens
GLTEFVEPIIQIK

SEQ ID NO: 1918 - protein, 7 aa, Homo sapiens
GLTLHLK

SEQ ID NO: 1919 - protein, 5 aa, Homo sapiens
GLTLR

SEQ ID NO: 1920 - protein, 9 aa, Homo sapiens
GLTSVINQK

SEQ ID NO: 1921 - protein, 14 aa, Homo sapiens
GLTTRPGSGLTNIK

SEQ ID NO: 1922 - protein, 6 aa, Homo sapiens
GLVGSK

SEQ ID NO: 1923 - protein, 9 aa, Homo sapiens
GLVLGPIHK

SEQ ID NO: 1924 - protein, 10 aa, Homo sapiens
GLVLSGVLHK

SEQ ID NO: 1925 - protein, 7 aa, Homo sapiens
GLVREAR

SEQ ID NO: 1926 - protein, 8 aa, Homo sapiens
GLVVNASR

SEQ ID NO: 1927 - protein, 10 aa, Homo sapiens
GLYDVVSVLR

SEQ ID NO: 1928 - protein, 28 aa, Homo sapiens
GMADQDGLKPTIDKPSEDSPPLEMLGPR

SEQ ID NO: 1929 - protein, 14 aa, Homo sapiens
GMAFLHTLEPLIPR

SEQ ID NO: 1930 - protein, 9 aa, Homo sapiens
GMALFGEGK

SEQ ID NO: 1931 - protein, 15 aa, Homo sapiens
GMALFGEGKAEFTGR

SEQ ID NO: 1932 - protein, 21 aa, Homo sapiens
GMDSCKGDSGGAFAVQDPNDK

SEQ ID NO: 1933 - protein, 13 aa, Homo sapiens
GMLREDAVLEYLK

SEQ ID NO: 1934 - protein, 13 aa, Homo sapiens
GMSISRPNAVVGR

SEQ ID NO: 1935 - protein, 11 aa, Homo sapiens
GMTNINDGLLR

SEQ ID NO: 1936 - protein, 23 aa, Homo sapiens
GMTRPLSTLISSSQSCQYTLDAK

SEQ ID NO: 1937 - protein, 35 aa, Homo sapiens
GMVLDENYNNLANAVISVSGINHDVTSGDHGDYFR

SEQ ID NO: 1938 - protein, 22 aa, Homo sapiens
GNDDHWIVDTDYDTYAVQYSCR

SEQ ID NO: 1939 - protein, 9 aa, Homo sapiens
GNDIIAAAK

SEQ ID NO: 1940 - protein, 12 aa, Homo sapiens
GNFHAVYRDDLK

SEQ ID NO: 1941 - protein, 33 aa, Homo sapiens
GNFLAANDQELDCDILQLEYVGGISMLIVVPHK

SEQ ID NO: 1942 - protein, 9 aa, Homo sapiens
GNLCVNLMR

SEQ ID NO: 1943 - protein, 14 aa, Homo sapiens
GNLVSIHNFNINYR

SEQ ID NO: 1944 - protein, 9 aa, Homo sapiens
GNPAVSYVR

SEQ ID NO: 1945 - protein, 61 aa, Homo sapiens
GNPEQTPVLKPEEEAPAPEVGASKPEGIDSRPETLHPGRPQPPAEEELCSGKPFDAFTDLK

SEQ ID NO: 1946 - protein, 7 aa, Homo sapiens
GNPPIYR

SEQ ID NO: 1947 - protein, 11 aa, Homo sapiens
GNQGFNNNWLR

SEQ ID NO: 1948 - protein, 8 aa, Homo sapiens
GNTEGLQK

SEQ ID NO: 1949 - protein, 11 aa, Homo sapiens
GNVATEISTER

SEQ ID NO: 1950 - protein, 25 aa, Homo sapiens
GNVAVTVSGHTCQHWSAQTPHTHNR

SEQ ID NO: 1951 - protein, 8 aa, Homo sapiens
GPAYGLSR

SEQ ID NO: 1952 - protein, 17 aa, Homo sapiens
GPDGLTAFEATDNQAIK

SEQ ID NO: 1953 - protein, 10 aa, Homo sapiens
GPDPSSPAFR

SEQ ID NO: 1954 - protein, 12 aa, Homo sapiens
GPDVLTATVSGK

SEQ ID NO: 1955 - protein, 23 aa, Homo sapiens
GPEEEHLGILGPVIWAEVGDTIR

SEQ ID NO: 1956 - protein, 14 aa, Homo sapiens
GPEVQLVAHSPWLK

SEQ ID NO: 1957 - protein, 19 aa, Homo sapiens
GPEVQLVAHSPWLKDSLSR

SEQ ID NO: 1958 - protein, 13 aa, Homo sapiens
GPGGVWAAKLISR

SEQ ID NO: 1959 - protein, 14 aa, Homo sapiens
GPGPGGPGGAGVAR

SEQ ID NO: 1960 - protein, 20 aa, Homo sapiens
GPHALGAPSLLLTGTQLYGR

SEQ ID NO: 1961 - protein, 13 aa, Homo sapiens
GPHKADSIQGTAR

SEQ ID NO: 1962 - protein, 5 aa, Homo sapiens
GPILK

SEQ ID NO: 1963 - protein, 8 aa, Homo sapiens
GPLDQLEK

SEQ ID NO: 1964 - protein, 16 aa, Homo sapiens
GPLEHLYSLHIPNCDK

SEQ ID NO: 1965 - protein, 6 aa, Homo sapiens
GPLKLK

SEQ ID NO: 1966 - protein, 5 aa, Homo sapiens
GPLLK

SEQ ID NO: 1967 - protein, 6 aa, Homo sapiens
GPLLKK

SEQ ID NO: 1968 - protein, 6 aa, Homo sapiens
GPLLNK

SEQ ID NO: 1969 - protein, 19 aa, Homo sapiens
GPLLVQDVVFTDEMAHFDR

SEQ ID NO: 1970 - protein, 7 aa, Homo sapiens
GPLQLER

SEQ ID NO: 1971 - protein, 8 aa, Homo sapiens
GPRPFHCR

SEQ ID NO: 1972 - protein, 7 aa, Homo sapiens
GPTQEFK

SEQ ID NO: 1973 - protein, 8 aa, Homo sapiens
GPTQEFKK

SEQ ID NO: 1974 - protein, 8 aa, Homo sapiens
GPVFVKPK

SEQ ID NO: 1975 - protein, 14 aa, Homo sapiens
GPVLAWINAVSAFR

SEQ ID NO: 1976 - protein, 26 aa, Homo sapiens
GPVLPPESFVVLHRPNQDQILTNLSK

SEQ ID NO: 1977 - protein, 10 aa, Homo sapiens
GPVLQLHDLK

SEQ ID NO: 1978 - protein, 11 aa, Homo sapiens
GPVLQLHDLKR

SEQ ID NO: 1979 - protein, 16 aa, Homo sapiens
GPYESGSGHSSGLGHR

SEQ ID NO: 1980 - protein, 17 aa, Homo sapiens
GQELCADYSENTFTEYK

SEQ ID NO: 1981 - protein, 18 aa, Homo sapiens
GQELCADYSENTFTEYKK

SEQ ID NO: 1982 - protein, 9 aa, Homo sapiens
GQESSTDIK

SEQ ID NO: 1983 - protein, 11 aa, Homo sapiens
GQGSSPVAMQK

SEQ ID NO: 1984 - protein, 14 aa, Homo sapiens
GQGTLSVVTMYHAK

SEQ ID NO: 1985 - protein, 23 aa, Homo sapiens
GQHVPGSPFQFTVGPLGEGGAHK

SEQ ID NO: 1986 - protein, 18 aa, Homo sapiens
GQIHLDPQQDYQLLQVQR

SEQ ID NO: 1987 - protein, 8 aa, Homo sapiens
GQIVFMNR

SEQ ID NO: 1988 - protein, 11 aa, Homo sapiens
GQIVFMNREPK

SEQ ID NO: 1989 - protein, 10 aa, Homo sapiens
GQKGEPGDIK

SEQ ID NO: 1990 - protein, 20 aa, Homo sapiens
GQPSVLQVVNLPIVERPVCK

SEQ ID NO: 1991 - protein, 17 aa, Homo sapiens
GQSISVTSIRPCAAETQ

SEQ ID NO: 1992 - protein, 9 aa, Homo sapiens
GQTLLAVAK

SEQ ID NO: 1993 - protein, 13 aa, Homo sapiens
GQVGSEQHSDIVK

SEQ ID NO: 1994 - protein, 16 aa, Homo sapiens
GQVPENEANVVITTLK

SEQ ID NO: 1995 - protein, 11 aa, Homo sapiens
GQVVKGSVFLR

SEQ ID NO: 1996 - protein, 10 aa, Homo sapiens
GQVVPALNEK

SEQ ID NO: 1997 - protein, 6 aa, Homo sapiens
GQWVTK

SEQ ID NO: 1998 - protein, 10 aa, Homo sapiens
GQYCYELDEK

SEQ ID NO: 1999 - protein, 29 aa, Homo sapiens
GRFPLYNLGFGHNVDFNFLEVMSMENNGR

SEQ ID NO: 2000 - protein, 8 aa, Homo sapiens
GRLDSELR

SEQ ID NO: 2001 - protein, 20 aa, Homo sapiens
GRPGPQPWCATTPNFDQDQR

SEQ ID NO: 2002 - protein, 17 aa, Homo sapiens
GRPTSTNPIASIFAWTR

SEQ ID NO: 2003 - protein, 19 aa, Homo sapiens
GSAADSEESPAIEAIHLLR

SEQ ID NO: 2004 - protein, 37 aa, Homo sapiens
GSAEAELMSVVPVFYVFHYLETGNHWNIFHSDPLIEK

SEQ ID NO: 2005 - protein, 58 aa, Homo sapiens
GSAGHWTSESSVSGSTGQWHSESGSFRPDSPGSGNARPNNPDWGTFEEVSGNVSPGTR

SEQ ID NO: 2006 - protein, 59 aa, Homo sapiens
GSAGHWTSESSVSGSTGQWHSESGSFRPDSPGSGNARPNNPDWGTFEEVSGNVSPGTRR

SEQ ID NO: 2007 - protein, 14 aa, Homo sapiens
GSAPPGPVPEGSIR

SEQ ID NO: 2008 - protein, 14 aa, Homo sapiens
GSEAINAPGDNPAK

SEQ ID NO: 2009 - protein, 9 aa, Homo sapiens
GSEMVVAGK

SEQ ID NO: 2010 - protein, 11 aa, Homo sapiens
GSESGIFTNTK

SEQ ID NO: 2011 - protein, 13 aa, Homo sapiens
GSFEFPVGDAVSK

SEQ ID NO: 2012 - protein, 8 aa, Homo sapiens
GSFPWQAK

SEQ ID NO: 2013 - protein, 14 aa, Homo sapiens
GSFTFQAALHHDGR

SEQ ID NO: 2014 - protein, 19 aa, Homo sapiens
GSGSGQSPSSGQHGTGFGR

SEQ ID NO: 2015 - protein, 11 aa, Homo sapiens
GSGTAEVELKK

SEQ ID NO: 2016 - protein, 8 aa, Homo sapiens
GSLHANGR

SEQ ID NO: 2017 - protein, 19 aa, Homo sapiens
GSLVQASEANLQAAQDFVR

SEQ ID NO: 2018 - protein, 13 aa, Homo sapiens
GSPAINVAVHVFR

SEQ ID NO: 2019 - protein, 14 aa, Homo sapiens
GSPAINVAVHVFRK

SEQ ID NO: 2020 - protein, 23 aa, Homo sapiens
GSQTQSHPDLGTEGCWDQLSAPR

SEQ ID NO: 2021 - protein, 6 aa, Homo sapiens
GSQYWR

SEQ ID NO: 2022 - protein, 14 aa, Homo sapiens
GSSAGGLQHLVSIR

SEQ ID NO: 2023 - protein, 8 aa, Homo sapiens
GSSGLEEK

SEQ ID NO: 2024 - protein, 12 aa, Homo sapiens
GSSTWLTAFVLK

SEQ ID NO: 2025 - protein, 27 aa, Homo sapiens
GSSTWLTAFVLKVLSLAQEQVGGSPEK

SEQ ID NO: 2026 - protein, 18 aa, Homo sapiens
GSSVHQDFLGFYVLDSHR

SEQ ID NO: 2027 - protein, 12 aa, Homo sapiens
GSSVIHCDADSK

SEQ ID NO: 2028 - protein, 13 aa, Homo sapiens
GSTGVAAAAGLHR

SEQ ID NO: 2029 - protein, 10 aa, Homo sapiens
GSTSHHLVSR

SEQ ID NO: 2030 - protein, 6 aa, Homo sapiens
GSVFLR

SEQ ID NO: 2031 - protein, 6 aa, Homo sapiens
GSVLSR

SEQ ID NO: 2032 - protein, 10 aa, Homo sapiens
GSVLYHLAVK

SEQ ID NO: 2033 - protein, 12 aa, Homo sapiens
GSVQYLPDLDDK

SEQ ID NO: 2034 - protein, 17 aa, Homo sapiens
GSVQYLPDLDDKNSQEK

SEQ ID NO: 2035 - protein, 25 aa, Homo sapiens
GSWFLTGVLGSQPVGGQAHMVLVTK

SEQ ID NO: 2036 - protein, 6 aa, Homo sapiens
GSWVNK

SEQ ID NO: 2037 - protein, 18 aa, Homo sapiens
GSWVNKFPVEMTHNHNFR

SEQ ID NO: 2038 - protein, 7 aa, Homo sapiens
GSWYSMR

SEQ ID NO: 2039 - protein, 39 aa, Homo sapiens
GSYGSGGSSYGSGGGSYGSGGGGGGHGSYGSGSSSGGYR

SEQ ID NO: 2040 - protein, 12 aa, Homo sapiens
GTDYHKQPWQAK

SEQ ID NO: 2041 - protein, 29 aa, Homo sapiens
GTEAAAVPEVELSDQPENTFLHPIIQIDR

SEQ ID NO: 2042 - protein, 22 aa, Homo sapiens
GTEAAGAMFLEAIPMSIPPEVK

SEQ ID NO: 2043 - protein, 8 aa, Homo sapiens
GTEDELDK

SEQ ID NO: 2044 - protein, 20 aa, Homo sapiens
GTEHASASANGHVSYSAVSR

SEQ ID NO: 2045 - protein, 29 aa, Homo sapiens
GTELQHLLHAVVPGPWQEDVADAEECAGR

SEQ ID NO: 2046 - protein, 13 aa, Homo sapiens
GTFATLSELHCDK

SEQ ID NO: 2047 - protein, 7 aa, Homo sapiens
GTGENYR

SEQ ID NO: 2048 - protein, 14 aa, Homo sapiens
GTHCNQVEVIATLK

SEQ ID NO: 2049 - protein, 21 aa, Homo sapiens
GTHVDLGLASANVDFAFSLYK

SEQ ID NO: 2050 - protein, 13 aa, Homo sapiens
GTKPIDLGNGQTR

SEQ ID NO: 2051 - protein, 8 aa, Homo sapiens
GTLDPVEK

SEQ ID NO: 2052 - protein, 8 aa, Homo sapiens
GTLLALER

SEQ ID NO: 2053 - protein, 10 aa, Homo sapiens
GTLTEGGTQK

SEQ ID NO: 2054 - protein, 12 aa, Homo sapiens
GTSQNDPNWVVR

SEQ ID NO: 2055 - protein, 11 aa, Homo sapiens
GTSSTTTTGKK

SEQ ID NO: 2056 - protein, 10 aa, Homo sapiens
GTVEPQLEAR

SEQ ID NO: 2057 - protein, 12 aa, Homo sapiens
GTVFFDEFTFVK

SEQ ID NO: 2058 - protein, 12 aa, Homo sapiens
GTVQALHATGAR

SEQ ID NO: 2059 - protein, 7 aa, Homo sapiens
GTVYNYR

SEQ ID NO: 2060 - protein, 13 aa, Homo sapiens
GTWTQPFDLASTR

SEQ ID NO: 2061 - protein, 16 aa, Homo sapiens
GTYIPVPIVSELQSGK

SEQ ID NO: 2062 - protein, 10 aa, Homo sapiens
GTYSTTVTGR

SEQ ID NO: 2063 - protein, 9 aa, Homo sapiens
GVALADFNR

SEQ ID NO: 2064 - protein, 9 aa, Homo sapiens
GVASLFAGR

SEQ ID NO: 2065 - protein, 12 aa, Homo sapiens
GVCEETSGAYEK

SEQ ID NO: 2066 - protein, 5 aa, Homo sapiens
GVELK

SEQ ID NO: 2067 - protein, 7 aa, Homo sapiens
GVFVLNK

SEQ ID NO: 2068 - protein, 8 aa, Homo sapiens
GVFVLNKK

SEQ ID NO: 2069 - protein, 21 aa, Homo sapiens
GVGAAATAVTQALNELLQHVK

SEQ ID NO: 2070 - protein, 27 aa, Homo sapiens
GVGGSQPPDIDKTELVEPTEYLVVHLK

SEQ ID NO: 2071 - protein, 8 aa, Homo sapiens
GVGQAAIR

SEQ ID NO: 2072 - protein, 15 aa, Homo sapiens
GVGWSHPLPQCEIVK

SEQ ID NO: 2073 - protein, 11 aa, Homo sapiens
GVHYISVSATR

SEQ ID NO: 2074 - protein, 5 aa, Homo sapiens
GVIIK

SEQ ID NO: 2075 - protein, 7 aa, Homo sapiens
GVISIPR

SEQ ID NO: 2076 - protein, 8 aa, Homo sapiens
GVLHNEVK

SEQ ID NO: 2077 - protein, 5 aa, Homo sapiens
GVLLK

SEQ ID NO: 2078 - protein, 17 aa, Homo sapiens
GVNLPGAAVDLPAVSEK

SEQ ID NO: 2079 - protein, 17 aa, Homo sapiens
GVNLQEFLNVTSVHLFK

SEQ ID NO: 2080 - protein, 7 aa, Homo sapiens
GVPIPNK

SEQ ID NO: 2081 - protein, 12 aa, Homo sapiens
GVPIPNKVIFIR

SEQ ID NO: 2082 - protein, 34 aa, Homo sapiens
GVQIPLPEGINFVHEVVTNHAGFLTIGADLHFAK

SEQ ID NO: 2083 - protein, 13 aa, Homo sapiens
GVSHGQFFDQHLK

SEQ ID NO: 2084 - protein, 7 aa, Homo sapiens
GVTFLLR

SEQ ID NO: 2085 - protein, 23 aa, Homo sapiens
GVTIPYRPKPSSSPVIFAGGQDR

SEQ ID NO: 2086 - protein, 17 aa, Homo sapiens
GVTSVSQIFHSPDLAIR

SEQ ID NO: 2087 - protein, 27 aa, Homo sapiens
GVYLFAVSVEFGPGPGTGQLVFGGHHR

SEQ ID NO: 2088 - protein, 6 aa, Homo sapiens
GVYLLK

SEQ ID NO: 2089 - protein, 23 aa, Homo sapiens
GVYSSDVFDIFPGTYQTLEMFPR

SEQ ID NO: 2090 - protein, 15 aa, Homo sapiens
GWHWVGAHTLGHNSR

SEQ ID NO: 2091 - protein, 9 aa, Homo sapiens
GWVDLFVPK

SEQ ID NO: 2092 - protein, 11 aa, Homo sapiens
GWVTDGFSSLK

SEQ ID NO: 2093 - protein, 17 aa, Homo sapiens
GYAIGYGIGSPHAQTIK

SEQ ID NO: 2094 - protein, 14 aa, Homo sapiens
GYAWGLNELKPISK

SEQ ID NO: 2095 - protein, 9 aa, Homo sapiens
GYFTHHHQR

SEQ ID NO: 2096 - protein, 7 aa, Homo sapiens
GYGFYTK

SEQ ID NO: 2097 - protein, 8 aa, Homo sapiens
GYGNSDYK

SEQ ID NO: 2098 - protein, 9 aa, Homo sapiens
GYGNSDYKR

SEQ ID NO: 2099 - protein, 10 aa, Homo sapiens
GYHLNEEGTR

SEQ ID NO: 2100 - protein, 7 aa, Homo sapiens
GYHLVGK

SEQ ID NO: 2101 - protein, 9 aa, Homo sapiens
GYILVGQAK

SEQ ID NO: 2102 - protein, 6 aa, Homo sapiens
GYLVLK

SEQ ID NO: 2103 - protein, 10 aa, Homo sapiens
GYSFTTTAER

SEQ ID NO: 2104 - protein, 10 aa, Homo sapiens
GYSIFSYATK

SEQ ID NO: 2105 - protein, 11 aa, Homo sapiens
GYSIFSYATKR

SEQ ID NO: 2106 - protein, 9 aa, Homo sapiens
GYTLADNGK

SEQ ID NO: 2107 - protein, 9 aa, Homo sapiens
GYTQQLAFR

SEQ ID NO: 2108 - protein, 11 aa, Homo sapiens
GYVIIKPLVWV

SEQ ID NO: 2109 - protein, 21 aa, Homo sapiens
GYWSDWSEEASGITYEDRPSK

SEQ ID NO: 2110 - protein, 8 aa, Homo sapiens
HADPDFTR

SEQ ID NO: 2111 - protein, 9 aa, Homo sapiens
HADPDFTRK

SEQ ID NO: 2112 - protein, 10 aa, Homo sapiens
HAEMVHTGLK

SEQ ID NO: 2113 - protein, 9 aa, Homo sapiens
HAFILQDTK

SEQ ID NO: 2114 - protein, 10 aa, Homo sapiens
HAIILLTDGK

SEQ ID NO: 2115 - protein, 8 aa, Homo sapiens
HCLVTVEK

SEQ ID NO: 2116 - protein, 32 aa, Homo sapiens
HDGNMVFSPFGMSLAMTGLMLGATGPTETQIK

SEQ ID NO: 2117 - protein, 9 aa, Homo sapiens
HDLGHFMLR

SEQ ID NO: 2118 - protein, 18 aa, Homo sapiens
HDTSLKPISVSYNPATAK

SEQ ID NO: 2119 - protein, 17 aa, Homo sapiens
HEEAPGHRPTTNPNASK

SEQ ID NO: 2120 - protein, 11 aa, Homo sapiens
HEGSFIQGAEK

SEQ ID NO: 2121 - protein, 21 aa, Homo sapiens
HELTDEELQSLFTNFANVVDK

SEQ ID NO: 2122 - protein, 15 aa, Homo sapiens
HEQDMVNGIMLSVEK

SEQ ID NO: 2123 - protein, 9 aa, Homo sapiens
HEVININLK

SEQ ID NO: 2124 - protein, 35 aa, Homo sapiens
HFEIEVDIFEPQGISMLDAEASFITNDLLGSALTK

SEQ ID NO: 2125 - protein, 7 aa, Homo sapiens
HFQNLGK

SEQ ID NO: 2126 - protein, 8 aa, Homo sapiens
HFQVPVFK

SEQ ID NO: 2127 - protein, 11 aa, Homo sapiens
HFVALSTNTTK

SEQ ID NO: 2128 - protein, 15 aa, Homo sapiens
HFVINLIGDFEVAEK

SEQ ID NO: 2129 - protein, 15 aa, Homo sapiens
HFWQQDEPPQSPWDR

SEQ ID NO: 2130 - protein, 14 aa, Homo sapiens
HGATVLTALGGILK

SEQ ID NO: 2131 - protein, 22 aa, Homo sapiens
HGESGSMAVFHQTQGPSYSESK

SEQ ID NO: 2132 - protein, 16 aa, Homo sapiens
HGGGGGGFGGGGFGSR

SEQ ID NO: 2133 - protein, 10 aa, Homo sapiens
HGGLFHENMR

SEQ ID NO: 2134 - protein, 10 aa, Homo sapiens
HGGLYHENMR

SEQ ID NO: 2135 - protein, 12 aa, Homo sapiens
HGIVEDWDLMER

SEQ ID NO: 2136 - protein, 10 aa, Homo sapiens
HGLQTVGIFR

SEQ ID NO: 2137 - protein, 12 aa, Homo sapiens
HGLSNSIYVFVR

SEQ ID NO: 2138 - protein, 7 aa, Homo sapiens
HGLYNLK

SEQ ID NO: 2139 - protein, 13 aa, Homo sapiens
HGNTDSEGIVEVK

SEQ ID NO: 2140 - protein, 13 aa, Homo sapiens
HGPGQMLFQNGDK

SEQ ID NO: 2141 - protein, 13 aa, Homo sapiens
HGTDDGVVWMNWK

SEQ ID NO: 2142 - protein, 20 aa, Homo sapiens
HGTDDGVVWMNWKGSWYSMR

SEQ ID NO: 2143 - protein, 10 aa, Homo sapiens
HGTVSSFVAK

SEQ ID NO: 2144 - protein, 16 aa, Homo sapiens
HGVQELEIELQSQLSK

SEQ ID NO: 2145 - protein, 15 aa, Homo sapiens
HHAAYVNNLNVTEEK

SEQ ID NO: 2146 - protein, 21 aa, Homo sapiens
HHGPQTLYLPVTLSSIPVFQR

SEQ ID NO: 2147 - protein, 9 aa, Homo sapiens
HHGPTITAK

SEQ ID NO: 2148 - protein, 10 aa, Homo sapiens
HHLEAVQNAK

SEQ ID NO: 2149 - protein, 9 aa, Homo sapiens
HHLGLEEPK

SEQ ID NO: 2150 - protein, 10 aa, Homo sapiens
HHLGLEEPKK

SEQ ID NO: 2151 - protein, 15 aa, Homo sapiens
HHPDFEVFVFDVGQK

SEQ ID NO: 2152 - protein, 11 aa, Homo sapiens
HHPEHFSGRPR

SEQ ID NO: 2153 - protein, 30 aa, Homo sapiens
HIADLAGNSEVILPVPAFNVINGGSHAGNK

SEQ ID NO: 2154 - protein, 9 aa, Homo sapiens
HIALSNMPK

SEQ ID NO: 2155 - protein, 7 aa, Homo sapiens
HILANFK

SEQ ID NO: 2156 - protein, 9 aa, Homo sapiens
HINIDQFVR

SEQ ID NO: 2157 - protein, 13 aa, Homo sapiens
HIQNIDIQHLAGK

SEQ ID NO: 2158 - protein, 12 aa, Homo sapiens
HIQPGAFDTLDR

SEQ ID NO: 2159 - protein, 11 aa, Homo sapiens
HISLTLPATFR

SEQ ID NO: 2160 - protein, 9 aa, Homo sapiens
HITSLEVIK

SEQ ID NO: 2161 - protein, 11 aa, Homo sapiens
HIVFLTEKNIK

SEQ ID NO: 2162 - protein, 18 aa, Homo sapiens
HIVLKPPTIVTQVIEVNK

SEQ ID NO: 2163 - protein, 11 aa, Homo sapiens
HIVTFDGQNFK

SEQ ID NO: 2164 - protein, 15 aa, Homo sapiens
HIYAISSAALSASYK

SEQ ID NO: 2165 - protein, 9 aa, Homo sapiens
HIYLLPSGR

SEQ ID NO: 2166 - protein, 9 aa, Homo sapiens
HKFLDSNIK

SEQ ID NO: 2167 - protein, 10 aa, Homo sapiens
HKLQVFQALR

SEQ ID NO: 2168 - protein, 15 aa, Homo sapiens
HLDSVLQQLQTEVYR

SEQ ID NO: 2169 - protein, 8 aa, Homo sapiens
HLEDVFSK

SEQ ID NO: 2170 - protein, 15 aa, Homo sapiens
HLEINPDHSIIETLR

SEQ ID NO: 2171 - protein, 15 aa, Homo sapiens
HLEVDVWVIEPQGLR

SEQ ID NO: 2172 - protein, 10 aa, Homo sapiens
HLFTGPVLSK

SEQ ID NO: 2173 - protein, 17 aa, Homo sapiens
HLFWFPAEAFHKPGLEK

SEQ ID NO: 2174 - protein, 14 aa, Homo sapiens
HLIDSLIDFLNFPR

SEQ ID NO: 2175 - protein, 6 aa, Homo sapiens
HLIFEK

SEQ ID NO: 2176 - protein, 22 aa, Homo sapiens
HLISTHFAPGDFQGFALVNPQR

SEQ ID NO: 2177 - protein, 8 aa, Homo sapiens
HLIVLINK

SEQ ID NO: 2178 - protein, 7 aa, Homo sapiens
HLKPLAK

SEQ ID NO: 2179 - protein, 8 aa, Homo sapiens
HLQAGILK

SEQ ID NO: 2180 - protein, 13 aa, Homo sapiens
HLQAGMQAYIDIK

SEQ ID NO: 2181 - protein, 30 aa, Homo sapiens
HLQPGMVLTVEPGIYFIDHLLDEALADPAR

SEQ ID NO: 2182 - protein, 8 aa, Homo sapiens
HLQPQPYK

SEQ ID NO: 2183 - protein, 9 aa, Homo sapiens
HLSISVVLK

SEQ ID NO: 2184 - protein, 11 aa, Homo sapiens
HLSLLTTLSNR

SEQ ID NO: 2185 - protein, 22 aa, Homo sapiens
HLSLLTTLSNRVCSQYAAYGEK

SEQ ID NO: 2186 - protein, 8 aa, Homo sapiens
HLVALSPK

SEQ ID NO: 2187 - protein, 15 aa, Homo sapiens
HLVPGAPFLLQALVR

SEQ ID NO: 2188 - protein, 22 aa, Homo sapiens
HLYVLEFSDHPGIHEPLEPEVK

SEQ ID NO: 2189 - protein, 10 aa, Homo sapiens
HMEASLQELK

SEQ ID NO: 2190 - protein, 11 aa, Homo sapiens
HMNGYGSHTFK

SEQ ID NO: 2191 - protein, 11 aa, Homo sapiens
HMQANPEPPKK

SEQ ID NO: 2192 - protein, 12 aa, Homo sapiens
HNSSGSILFLGR

SEQ ID NO: 2193 - protein, 19 aa, Homo sapiens
HNVYINGITYTPVSSTNEK

SEQ ID NO: 2194 - protein, 6 aa, Homo sapiens
HPALFK

SEQ ID NO: 2195 - protein, 15 aa, Homo sapiens
HPDEAAFFDTASTGK

SEQ ID NO: 2196 - protein, 11 aa, Homo sapiens
HPDLSIPELLR

SEQ ID NO: 2197 - protein, 7 aa, Homo sapiens
HPDMLTK

SEQ ID NO: 2198 - protein, 11 aa, Homo sapiens
HPDYSVVLLLR

SEQ ID NO: 2199 - protein, 9 aa, Homo sapiens
HPEELSLLR

SEQ ID NO: 2200 - protein, 8 aa, Homo sapiens
HPFLTALK

SEQ ID NO: 2201 - protein, 13 aa, Homo sapiens
HPGELRNGQVEIK

SEQ ID NO: 2202 - protein, 21 aa, Homo sapiens
HPLKPDNQPFPQSVSESCPGK

SEQ ID NO: 2203 - protein, 9 aa, Homo sapiens
HPNVFGFCR

SEQ ID NO: 2204 - protein, 14 aa, Homo sapiens
HPPEASVQIHQVSR

SEQ ID NO: 2205 - protein, 13 aa, Homo sapiens
HPPSPTRDECFAR

SEQ ID NO: 2206 - protein, 27 aa, Homo sapiens
HPPVVMNGAVADGILASYATGSSVEYR

SEQ ID NO: 2207 - protein, 8 aa, Homo sapiens
HPSFFLYR

SEQ ID NO: 2208 - protein, 14 aa, Homo sapiens
HPYFYAPELLFFAK

SEQ ID NO: 2209 - protein, 14 aa, Homo sapiens
HQAQIDHYLGLANK

SEQ ID NO: 2210 - protein, 16 aa, Homo sapiens
HQDFNSAVQLVENFCR

SEQ ID NO: 2211 - protein, 12 aa, Homo sapiens
HQDGSYSTFGER

SEQ ID NO: 2212 - protein, 12 aa, Homo sapiens
HQFLLTGDTQGR

SEQ ID NO: 2213 - protein, 30 aa, Homo sapiens
HQGTITVNEEGTQATTVTTVGFMPLSTQVR

SEQ ID NO: 2214 - protein, 11 aa, Homo sapiens
HQGVMVGMGQK

SEQ ID NO: 2215 - protein, 12 aa, Homo sapiens
HQLSEPAPAYHR

SEQ ID NO: 2216 - protein, 18 aa, Homo sapiens
HQLYIDETVNSNIPTNLR

SEQ ID NO: 2217 - protein, 24 aa, Homo sapiens
HQMDLVATLSQLGLQELFQAPDLR

SEQ ID NO: 2218 - protein, 22 aa, Homo sapiens
HQPQEFPTYVEPTNDEICEAFR

SEQ ID NO: 2219 - protein, 23 aa, Homo sapiens
HQPQEFPTYVEPTNDEICEAFRK

SEQ ID NO: 2220 - protein, 9 aa, Homo sapiens
HQPTAIIAK

SEQ ID NO: 2221 - protein, 10 aa, Homo sapiens
HQQTVTIPPK

SEQ ID NO: 2222 - protein, 13 aa, Homo sapiens
HQSPIDILDQYAR

SEQ ID NO: 2223 - protein, 11 aa, Homo sapiens
HQTVPQNTGGK

SEQ ID NO: 2224 - protein, 17 aa, Homo sapiens
HRHPDEAAFFDTASTGK

SEQ ID NO: 2225 - protein, 16 aa, Homo sapiens
HRLEDMEQALSPSVFK

SEQ ID NO: 2226 - protein, 10 aa, Homo sapiens
HRPELIDYGK

SEQ ID NO: 2227 - protein, 21 aa, Homo sapiens
HRPRPYPPNVGEEIQIGHIPR

SEQ ID NO: 2228 - protein, 24 aa, Homo sapiens
HRQGPVNLLSDPEQGVEVTGQYER

SEQ ID NO: 2229 - protein, 15 aa, Homo sapiens
HSAQPWADFTLLGAR

SEQ ID NO: 2230 - protein, 21 aa, Homo sapiens
HSGEENFYAYGFSVTYSCDPR

SEQ ID NO: 2231 - protein, 9 aa, Homo sapiens
HSHESQDLR

SEQ ID NO: 2232 - protein, 11 aa, Homo sapiens
HSIFTPETNPR

SEQ ID NO: 2233 - protein, 8 aa, Homo sapiens
HSIGYSIR

SEQ ID NO: 2234 - protein, 19 aa, Homo sapiens
HSITNPLAVLCEFISQSIK

SEQ ID NO: 2235 - protein, 28 aa, Homo sapiens
HSLPDLPYDYGALEPHINAQIMQLHHSK

SEQ ID NO: 2236 - protein, 13 aa, Homo sapiens
HSPQEAPHVQYER

SEQ ID NO: 2237 - protein, 16 aa, Homo sapiens
HSQAVEELAEQLEQTK

SEQ ID NO: 2238 - protein, 10 aa, Homo sapiens
HSTFIPGTNK

SEQ ID NO: 2239 - protein, 11 aa, Homo sapiens
HSTIFENLANK

SEQ ID NO: 2240 - protein, 14 aa, Homo sapiens
HSTIFENLANKADR

SEQ ID NO: 2241 - protein, 8 aa, Homo sapiens
HSTSMFFR

SEQ ID NO: 2242 - protein, 5 aa, Homo sapiens
HSVVK

SEQ ID NO: 2243 - protein, 13 aa, Homo sapiens
HSWTIPEDGNSQK

SEQ ID NO: 2244 - protein, 13 aa, Homo sapiens
HSYLHLAENYLIR

SEQ ID NO: 2245 - protein, 18 aa, Homo sapiens
HTAMVSWGGVSIPNSPFR

SEQ ID NO: 2246 - protein, 18 aa, Homo sapiens
HTASAWLMSAPNSGPHNR

SEQ ID NO: 2247 - protein, 20 aa, Homo sapiens
HTFMGVVSLGSPSGEVSHPR

SEQ ID NO: 2248 - protein, 9 aa, Homo sapiens
HTFTLSLPR

SEQ ID NO: 2249 - protein, 10 aa, Homo sapiens
HTLNQIDEVK

SEQ ID NO: 2250 - protein, 42 aa, Homo sapiens
HTLNQIDEVKVWPQQPSGELFEIEIDTLETTCHVLDPTPVAR

SEQ ID NO: 2251 - protein, 10 aa, Homo sapiens
HTNYTMEHIR

SEQ ID NO: 2252 - protein, 9 aa, Homo sapiens
HTQTGTPTR

SEQ ID NO: 2253 - protein, 10 aa, Homo sapiens
HTSLGPLEAK

SEQ ID NO: 2254 - protein, 11 aa, Homo sapiens
HTSTEHTSSSR

SEQ ID NO: 2255 - protein, 18 aa, Homo sapiens
HTSVQTTSSGSGPFTDVR

SEQ ID NO: 2256 - protein, 18 aa, Homo sapiens
HTVNPNMKEDGILGPIIR

SEQ ID NO: 2257 - protein, 12 aa, Homo sapiens
HTVSGGSLLMAR

SEQ ID NO: 2258 - protein, 8 aa, Homo sapiens
HVAEAICK

SEQ ID NO: 2259 - protein, 21 aa, Homo sapiens
HVEDVPAFQALGSLNDLQFFR

SEQ ID NO: 2260 - protein, 13 aa, Homo sapiens
HVFGESDELIGQK

SEQ ID NO: 2261 - protein, 8 aa, Homo sapiens
HVFGQAVK

SEQ ID NO: 2262 - protein, 8 aa, Homo sapiens
HVFGQPAK

SEQ ID NO: 2263 - protein, 8 aa, Homo sapiens
HVFGQPVK

SEQ ID NO: 2264 - protein, 19 aa, Homo sapiens
HVFWGSGSHTLPALLENLK

SEQ ID NO: 2265 - protein, 11 aa, Homo sapiens
HVIGLQMGSNR

SEQ ID NO: 2266 - protein, 25 aa, Homo sapiens
HVIILMTDGLHNMGGDPITVIDEIR

SEQ ID NO: 2267 - protein, 32 aa, Homo sapiens
HVIILMTDGLHNMGGDPITVIDEIRDLLYIGK

SEQ ID NO: 2268 - protein, 11 aa, Homo sapiens
HVLAAWALGAK

SEQ ID NO: 2269 - protein, 8 aa, Homo sapiens
HVLSVLSK

SEQ ID NO: 2270 - protein, 11 aa, Homo sapiens
HVLTLTDQVTR

SEQ ID NO: 2271 - protein, 17 aa, Homo sapiens
HVSSPLASYFLSFPYAR

SEQ ID NO: 2272 - protein, 12 aa, Homo sapiens
HVVLAQLWAGLR

SEQ ID NO: 2273 - protein, 11 aa, Homo sapiens
HVVPNEVVVQR

SEQ ID NO: 2274 - protein, 22 aa, Homo sapiens
HVVYPTAWMNQLPLLAAIEIQK

SEQ ID NO: 2275 - protein, 12 aa, Homo sapiens
HVYGELDVQIQR

SEQ ID NO: 2276 - protein, 14 aa, Homo sapiens
HWPFMVVNDAGRPK

SEQ ID NO: 2277 - protein, 12 aa, Homo sapiens
HYDGSYSTFGER

SEQ ID NO: 2278 - protein, 10 aa, Homo sapiens
HYEGSTVPEK

SEQ ID NO: 2279 - protein, 11 aa, Homo sapiens
HYEGSTVPEKK

SEQ ID NO: 2280 - protein, 20 aa, Homo sapiens
HYFQNTQGLIFVVDSNDRER

SEQ ID NO: 2281 - protein, 10 aa, Homo sapiens
HYGALIGLNR

SEQ ID NO: 2282 - protein, 10 aa, Homo sapiens
HYGGLTGLNK

SEQ ID NO: 2283 - protein, 14 aa, Homo sapiens
HYGPGWVSMANAGK

SEQ ID NO: 2284 - protein, 24 aa, Homo sapiens
HYLMWGLSSDFWGEKPNLSYIIGK

SEQ ID NO: 2285 - protein, 10 aa, Homo sapiens
HYQINQQWER

SEQ ID NO: 2286 - protein, 20 aa, Homo sapiens
HYYESEVLAMNFQDWATASR

SEQ ID NO: 2287 - protein, 23 aa, Homo sapiens
HYYIAAEEIIWNYAPSGIDIFTK

SEQ ID NO: 2288 - protein, 20 aa, Homo sapiens
HYYIGIIETTWDYASDHGEK

SEQ ID NO: 2289 - protein, 21 aa, Homo sapiens
HYYIGIIETTWDYASDHGEKK

SEQ ID NO: 2290 - protein, 26 aa, Homo sapiens
IACVLPVLMDGIQSHPQKPFYTVGEK

SEQ ID NO: 2291 - protein, 8 aa, Homo sapiens
IADAHLDR

SEQ ID NO: 2292 - protein, 14 aa, Homo sapiens
IAEFTTNLTEEEEK

SEQ ID NO: 2293 - protein, 13 aa, Homo sapiens
IAELSATAQEIIK

SEQ ID NO: 2294 - protein, 7 aa, Homo sapiens
IAFSATR

SEQ ID NO: 2295 - protein, 7 aa, Homo sapiens
IAGVNIK

SEQ ID NO: 2296 - protein, 6 aa, Homo sapiens
IAHDLR

SEQ ID NO: 2297 - protein, 7 aa, Homo sapiens
IAHGHYK

SEQ ID NO: 2298 - protein, 13 aa, Homo sapiens
IAIANIIDEIIEK

SEQ ID NO: 2299 - protein, 7 aa, Homo sapiens
IAIDLFK

SEQ ID NO: 2300 - protein, 14 aa, Homo sapiens
IALGGLLFPASNLR

SEQ ID NO: 2301 - protein, 7 aa, Homo sapiens
IALSVHK

SEQ ID NO: 2302 - protein, 7 aa, Homo sapiens
IAMAALK

SEQ ID NO: 2303 - protein, 5 aa, Homo sapiens
IANKK

SEQ ID NO: 2304 - protein, 11 aa, Homo sapiens
IAPANADFAFR

SEQ ID NO: 2305 - protein, 16 aa, Homo sapiens
IAPPPVVSSGPFLFIK

SEQ ID NO: 2306 - protein, 16 aa, Homo sapiens
IAPQLSTEELVSLGEK

SEQ ID NO: 2307 - protein, 19 aa, Homo sapiens
IAQLPLTGSMSIIFFLPLK

SEQ ID NO: 2308 - protein, 14 aa, Homo sapiens
IAQWQSFQLEGGLK

SEQ ID NO: 2309 - protein, 8 aa, Homo sapiens
IAQWQSLK

SEQ ID NO: 2310 - protein, 9 aa, Homo sapiens
IAQYYYTFK

SEQ ID NO: 2311 - protein, 5 aa, Homo sapiens
IARPK

SEQ ID NO: 2312 - protein, 14 aa, Homo sapiens
IASFSQNCDIYPGK

SEQ ID NO: 2313 - protein, 22 aa, Homo sapiens
IASFSQNCDIYPGKDFVQPPTK

SEQ ID NO: 2314 - protein, 9 aa, Homo sapiens
IASGVIAPK

SEQ ID NO: 2315 - protein, 7 aa, Homo sapiens
IAWHVIR

SEQ ID NO: 2316 - protein, 6 aa, Homo sapiens
IAYCEK

SEQ ID NO: 2317 - protein, 14 aa, Homo sapiens
IAYGTQGSSGYSLR

SEQ ID NO: 2318 - protein, 10 aa, Homo sapiens
ICAMEGLPQK

SEQ ID NO: 2319 - protein, 9 aa, Homo sapiens
IDAMDVHVK

SEQ ID NO: 2320 - protein, 10 aa, Homo sapiens
IDDIWNLEVK

SEQ ID NO: 2321 - protein, 21 aa, Homo sapiens
IDDIWNLEVKENFAGEATLQR

SEQ ID NO: 2322 - protein, 24 aa, Homo sapiens
IDDPTDSKPEDWDKPEHIPDPDAK

SEQ ID NO: 2323 - protein, 7 aa, Homo sapiens
IDEPGLR

SEQ ID NO: 2324 - protein, 6 aa, Homo sapiens
IDGQFR

SEQ ID NO: 2325 - protein, 6 aa, Homo sapiens
IDIAGR

SEQ ID NO: 2326 - protein, 5 aa, Homo sapiens
IDIIK

SEQ ID NO: 2327 - protein, 9 aa, Homo sapiens
IDITLSSVK

SEQ ID NO: 2328 - protein, 8 aa, Homo sapiens
IDLADFEK

SEQ ID NO: 2329 - protein, 5 aa, Homo sapiens
IDNVK

SEQ ID NO: 2330 - protein, 6 aa, Homo sapiens
IDNVKK

SEQ ID NO: 2331 - protein, 20 aa, Homo sapiens
IDQLEGDHQLIQEALIFDNK

SEQ ID NO: 2332 - protein, 6 aa, Homo sapiens
IDQLEK

SEQ ID NO: 2333 - protein, 9 aa, Homo sapiens
IDQNVEELK

SEQ ID NO: 2334 - protein, 11 aa, Homo sapiens
IDQNVEELKGR

SEQ ID NO: 2335 - protein, 9 aa, Homo sapiens
IDQTVEELR

SEQ ID NO: 2336 - protein, 10 aa, Homo sapiens
IDQTVEELRR

SEQ ID NO: 2337 - protein, 12 aa, Homo sapiens
IDRFMQAVTGWK

SEQ ID NO: 2338 - protein, 8 aa, Homo sapiens
IDRPEASR

SEQ ID NO: 2339 - protein, 6 aa, Homo sapiens
IDSEIK

SEQ ID NO: 2340 - protein, 9 aa, Homo sapiens
IDSLLENDR

SEQ ID NO: 2341 - protein, 24 aa, Homo sapiens
IDSLLENDRQQTHMLDVMQDHFSR

SEQ ID NO: 2342 - protein, 7 aa, Homo sapiens
IDTALIK

SEQ ID NO: 2343 - protein, 35 aa, Homo sapiens
IDTINLFPATLFDAYMVAQNPGEWMLSCQNLNHLK

SEQ ID NO: 2344 - protein, 12 aa, Homo sapiens
IDTQDIEASHYR

SEQ ID NO: 2345 - protein, 9 aa, Homo sapiens
IDVHLVPDR

SEQ ID NO: 2346 - protein, 10 aa, Homo sapiens
IDVHLVPDRK

SEQ ID NO: 2347 - protein, 7 aa, Homo sapiens
IDVHWTR

SEQ ID NO: 2348 - protein, 5 aa, Homo sapiens
IEAIK

SEQ ID NO: 2349 - protein, 5 aa, Homo sapiens
IEALK

SEQ ID NO: 2350 - protein, 8 aa, Homo sapiens
IEDGFSLK

SEQ ID NO: 2351 - protein, 24 aa, Homo sapiens
IEDGFSLKEQLQDMGLVDLFSPEK

SEQ ID NO: 2352 - protein, 9 aa, Homo sapiens
IEDGTLASK

SEQ ID NO: 2353 - protein, 16 aa, Homo sapiens
IEDGVPQHLVLVLGGK

SEQ ID NO: 2354 - protein, 17 aa, Homo sapiens
IEDLPTMVTLGNSFLHK

SEQ ID NO: 2355 - protein, 7 aa, Homo sapiens
IEEADCK

SEQ ID NO: 2356 - protein, 6 aa, Homo sapiens
IEEAQK

SEQ ID NO: 2357 - protein, 16 aa, Homo sapiens
IEEGVPQFLVLISSGK

SEQ ID NO: 2358 - protein, 7 aa, Homo sapiens
IEEIAAK

SEQ ID NO: 2359 - protein, 11 aa, Homo sapiens
IEFISTMEGYK

SEQ ID NO: 2360 - protein, 17 aa, Homo sapiens
IEGDEEMHCSDDGFWSK

SEQ ID NO: 2361 - protein, 15 aa, Homo sapiens
IEGNLIFDPNNYLPK

SEQ ID NO: 2362 - protein, 10 aa, Homo sapiens
IEIPLPFGGK

SEQ ID NO: 2363 - protein, 8 aa, Homo sapiens
IEISELNR

SEQ ID NO: 2364 - protein, 13 aa, Homo sapiens
IEKVEHSDLSFSK

SEQ ID NO: 2365 - protein, 5 aa, Homo sapiens
IEMSK

SEQ ID NO: 2366 - protein, 5 aa, Homo sapiens
IENFR

SEQ ID NO: 2367 - protein, 9 aa, Homo sapiens
IENVSYQDK

SEQ ID NO: 2368 - protein, 7 aa, Homo sapiens
IEPSQAK

SEQ ID NO: 2369 - protein, 6 aa, Homo sapiens
IEREIK

SEQ ID NO: 2370 - protein, 6 aa, Homo sapiens
IESLTR

SEQ ID NO: 2371 - protein, 21 aa, Homo sapiens
IESPGYLTSPGYPHSYHPSEK

SEQ ID NO: 2372 - protein, 11 aa, Homo sapiens
IETISHEDLQR

SEQ ID NO: 2373 - protein, 12 aa, Homo sapiens
IEVEKPFAIAKE

SEQ ID NO: 2374 - protein, 13 aa, Homo sapiens
IEVGRFPVLEGQR

SEQ ID NO: 2375 - protein, 5 aa, Homo sapiens
IEVIK

SEQ ID NO: 2376 - protein, 5 aa, Homo sapiens
IEVLK

SEQ ID NO: 2377 - protein, 6 aa, Homo sapiens
IEVLKR

SEQ ID NO: 2378 - protein, 9 aa, Homo sapiens
IEVNVELRK

SEQ ID NO: 2379 - protein, 6 aa, Homo sapiens
IEVQLK

SEQ ID NO: 2380 - protein, 12 aa, Homo sapiens
IEVQLKNEHTSK

SEQ ID NO: 2381 - protein, 16 aa, Homo sapiens
IEWLESHQDADIEDFK

SEQ ID NO: 2382 - protein, 31 aa, Homo sapiens
IFDDFGTHYFTSGSLGGVYDLLYQFSSEELK

SEQ ID NO: 2383 - protein, 5 aa, Homo sapiens
IFDGK

SEQ ID NO: 2384 - protein, 9 aa, Homo sapiens
IFEGNTNTK

SEQ ID NO: 2385 - protein, 25 aa, Homo sapiens
IFELFEVGFLSPATFTVYEYHRPDK

SEQ ID NO: 2386 - protein, 19 aa, Homo sapiens
IFFHLNAVALGDGGHYTCR

SEQ ID NO: 2387 - protein, 11 aa, Homo sapiens
IFFPGVSEFGK

SEQ ID NO: 2388 - protein, 10 aa, Homo sapiens
IFGFMEEERK

SEQ ID NO: 2389 - protein, 5 aa, Homo sapiens
IFGNK

SEQ ID NO: 2390 - protein, 6 aa, Homo sapiens
IFHGLK

SEQ ID NO: 2391 - protein, 8 aa, Homo sapiens
IFHVNWFR

SEQ ID NO: 2392 - protein, 14 aa, Homo sapiens
IFILGPSHHVPLSR

SEQ ID NO: 2393 - protein, 5 aa, Homo sapiens
IFLYK

SEQ ID NO: 2394 - protein, 9 aa, Homo sapiens
IFNGRPAQK

SEQ ID NO: 2395 - protein, 52 aa, Homo sapiens
IFQHAVVIHSDYAISVQALNAKPDTAELTLLRPIQALGTEYFVLTPPGTSAR

SEQ ID NO: 2396 - protein, 15 aa, Homo sapiens
IFRDGEEAGAYDGPR

SEQ ID NO: 2397 - protein, 5 aa, Homo sapiens
IFSVK

SEQ ID NO: 2398 - protein, 11 aa, Homo sapiens
IFTKVQTAHFK

SEQ ID NO: 2399 - protein, 7 aa, Homo sapiens
IFTNFHR

SEQ ID NO: 2400 - protein, 6 aa, Homo sapiens
IFTNTK

SEQ ID NO: 2401 - protein, 24 aa, Homo sapiens
IFTPLLHQIELEKPKPIPYIYGSR

SEQ ID NO: 2402 - protein, 7 aa, Homo sapiens
IFTVNHK

SEQ ID NO: 2403 - protein, 13 aa, Homo sapiens
IFTVNHKLLPVGR

SEQ ID NO: 2404 - protein, 6 aa, Homo sapiens
IFVTTK

SEQ ID NO: 2405 - protein, 5 aa, Homo sapiens
IFVWK

SEQ ID NO: 2406 - protein, 6 aa, Homo sapiens
IFWGGK

SEQ ID NO: 2407 - protein, 5 aa, Homo sapiens
IFYIK

SEQ ID NO: 2408 - protein, 5 aa, Homo sapiens
IFYLK

SEQ ID NO: 2409 - protein, 15 aa, Homo sapiens
IFYNQQNHYDGSTGK

SEQ ID NO: 2410 - protein, 10 aa, Homo sapiens
IGAEVYHNLK

SEQ ID NO: 2411 - protein, 5 aa, Homo sapiens
IGAIK

SEQ ID NO: 2412 - protein, 13 aa, Homo sapiens
IGDLHPQIVNLLK

SEQ ID NO: 2413 - protein, 6 aa, Homo sapiens
IGDNLR

SEQ ID NO: 2414 - protein, 7 aa, Homo sapiens
IGDQWDK

SEQ ID NO: 2415 - protein, 6 aa, Homo sapiens
IGDTWR

SEQ ID NO: 2416 - protein, 7 aa, Homo sapiens
IGDTWSK

SEQ ID NO: 2417 - protein, 8 aa, Homo sapiens
IGDTWSKK

SEQ ID NO: 2418 - protein, 20 aa, Homo sapiens
IGEHTPSALAIMENANVLAR

SEQ ID NO: 2419 - protein, 13 aa, Homo sapiens
IGEIKEETTSHLR

SEQ ID NO: 2420 - protein, 11 aa, Homo sapiens
IGESIELTCPK

SEQ ID NO: 2421 - protein, 17 aa, Homo sapiens
IGFKLGVRPSQGGEAPR

SEQ ID NO: 2422 - protein, 9 aa, Homo sapiens
IGFPWSEIR

SEQ ID NO: 2423 - protein, 18 aa, Homo sapiens
IGGAIEEVYVSLGVSVGK

SEQ ID NO: 2424 - protein, 6 aa, Homo sapiens
IGGSYK

SEQ ID NO: 2425 - protein, 7 aa, Homo sapiens
IGGSYKK

SEQ ID NO: 2426 - protein, 5 aa, Homo sapiens
IGGYK

SEQ ID NO: 2427 - protein, 10 aa, Homo sapiens
IGHLMLKPLK

SEQ ID NO: 2428 - protein, 13 aa, Homo sapiens
IGITNHDEYSLVR

SEQ ID NO: 2429 - protein, 9 aa, Homo sapiens
IGKPAPDFK

SEQ ID NO: 2430 - protein, 9 aa, Homo sapiens
IGNFSTDIK

SEQ ID NO: 2431 - protein, 15 aa, Homo sapiens
IGQDGISTSATTNLK

SEQ ID NO: 2432 - protein, 8 aa, Homo sapiens
IGVELTGR

SEQ ID NO: 2433 - protein, 9 aa, Homo sapiens
IGVHAFQQR

SEQ ID NO: 2434 - protein, 23 aa, Homo sapiens
IGYPKPALLHSTFFPALQGAQTK

SEQ ID NO: 2435 - protein, 44 aa, Homo sapiens
IHEDSDSALQLQDFYQEVANPLLTAVTFEYPSNAVEEVTQNNFR

SEQ ID NO: 2436 - protein, 7 aa, Homo sapiens
IHFIAPK

SEQ ID NO: 2437 - protein, 16 aa, Homo sapiens
IHFPLATYAPVISAEK

SEQ ID NO: 2438 - protein, 10 aa, Homo sapiens
IHGILSNTHR

SEQ ID NO: 2439 - protein, 9 aa, Homo sapiens
IHIGSSFEK

SEQ ID NO: 2440 - protein, 16 aa, Homo sapiens
IHIGSSFEKYPLYVLK

SEQ ID NO: 2441 - protein, 29 aa, Homo sapiens
IHILPSMNPDGYEVAAAQGPNKPGYLVGR

SEQ ID NO: 2442 - protein, 8 aa, Homo sapiens
IHLGSSPK

SEQ ID NO: 2443 - protein, 15 aa, Homo sapiens
IHLISTQSAIPYALR

SEQ ID NO: 2444 - protein, 24 aa, Homo sapiens
IHLISTQSAIPYALRVELEDWNGR

SEQ ID NO: 2445 - protein, 7 aa, Homo sapiens
IHLMAGR

SEQ ID NO: 2446 - protein, 6 aa, Homo sapiens
IHPFFK

SEQ ID NO: 2447 - protein, 6 aa, Homo sapiens
IHPLLK

SEQ ID NO: 2448 - protein, 11 aa, Homo sapiens
IHPTSVISGYR

SEQ ID NO: 2449 - protein, 9 aa, Homo sapiens
IHPVSTMVK

SEQ ID NO: 2450 - protein, 9 aa, Homo sapiens
IHSDLAEER

SEQ ID NO: 2451 - protein, 18 aa, Homo sapiens
IHSGSFQSQVELSNDQEK

SEQ ID NO: 2452 - protein, 6 aa, Homo sapiens
IHVYEK

SEQ ID NO: 2453 - protein, 10 aa, Homo sapiens
IHWESASLLR

SEQ ID NO: 2454 - protein, 7 aa, Homo sapiens
IIAPPER

SEQ ID NO: 2455 - protein, 8 aa, Homo sapiens
IIAPPERK

SEQ ID NO: 2456 - protein, 5 aa, Homo sapiens
IIAQK

SEQ ID NO: 2457 - protein, 13 aa, Homo sapiens
IIDELNVKPEGTR

SEQ ID NO: 2458 - protein, 9 aa, Homo sapiens
IIEGEPNLK

SEQ ID NO: 2459 - protein, 6 aa, Homo sapiens
IIFGYK

SEQ ID NO: 2460 - protein, 22 aa, Homo sapiens
IIFHENYNAGTYQNDIALIEMK

SEQ ID NO: 2461 - protein, 23 aa, Homo sapiens
IIFHENYNAGTYQNDIALIEMKK

SEQ ID NO: 2462 - protein, 6 aa, Homo sapiens
IIGGQK

SEQ ID NO: 2463 - protein, 10 aa, Homo sapiens
IIGGSDADIK

SEQ ID NO: 2464 - protein, 7 aa, Homo sapiens
IIGHMLK

SEQ ID NO: 2465 - protein, 7 aa, Homo sapiens
IIHFGTR

SEQ ID NO: 2466 - protein, 18 aa, Homo sapiens
IIHGNQIATNGVVHVIDR

SEQ ID NO: 2467 - protein, 5 aa, Homo sapiens
IIIIK

SEQ ID NO: 2468 - protein, 5 aa, Homo sapiens
IIILK

SEQ ID NO: 2469 - protein, 5 aa, Homo sapiens
IIILR

SEQ ID NO: 2470 - protein, 9 aa, Homo sapiens
IIINVGGIK

SEQ ID NO: 2471 - protein, 6 aa, Homo sapiens
IIIPPR

SEQ ID NO: 2472 - protein, 7 aa, Homo sapiens
IIKETQR

SEQ ID NO: 2473 - protein, 9 aa, Homo sapiens
IILFSNQFR

SEQ ID NO: 2474 - protein, 9 aa, Homo sapiens
IILFTEDPR

SEQ ID NO: 2475 - protein, 9 aa, Homo sapiens
IILLFDAHK

SEQ ID NO: 2476 - protein, 9 aa, Homo sapiens
IILTARPFR

SEQ ID NO: 2477 - protein, 5 aa, Homo sapiens
IILYK

SEQ ID NO: 2478 - protein, 16 aa, Homo sapiens
IINEPTAAAIAYGLDK

SEQ ID NO: 2479 - protein, 17 aa, Homo sapiens
IINEPTAAAIAYGLDKR

SEQ ID NO: 2480 - protein, 17 aa, Homo sapiens
IINEVSKPLAHHIPVEK

SEQ ID NO: 2481 - protein, 6 aa, Homo sapiens
IIPFNR

SEQ ID NO: 2482 - protein, 21 aa, Homo sapiens
IIPFNRLTIGEGQQHHLGGAK

SEQ ID NO: 2483 - protein, 13 aa, Homo sapiens
IIPHHNYNAAINK

SEQ ID NO: 2484 - protein, 6 aa, Homo sapiens
IIRASR

SEQ ID NO: 2485 - protein, 10 aa, Homo sapiens
IISDYHQQFR

SEQ ID NO: 2486 - protein, 8 aa, Homo sapiens
IISIMDEK

SEQ ID NO: 2487 - protein, 6 aa, Homo sapiens
IITITK

SEQ ID NO: 2488 - protein, 8 aa, Homo sapiens
IIVPLNNR

SEQ ID NO: 2489 - protein, 8 aa, Homo sapiens
IIYKENER

SEQ ID NO: 2490 - protein, 8 aa, Homo sapiens
IKEDEDDK

SEQ ID NO: 2491 - protein, 10 aa, Homo sapiens
IKFEMEQNLR

SEQ ID NO: 2492 - protein, 9 aa, Homo sapiens
IKGVISIPR

SEQ ID NO: 2493 - protein, 6 aa, Homo sapiens
IKLPAK

SEQ ID NO: 2494 - protein, 7 aa, Homo sapiens
IKPAVIK

SEQ ID NO: 2495 - protein, 5 aa, Homo sapiens
IKPLK

SEQ ID NO: 2496 - protein, 13 aa, Homo sapiens
IKPSFNIVPLTSR

SEQ ID NO: 2497 - protein, 13 aa, Homo sapiens
IKPVFIEDANFGR

SEQ ID NO: 2498 - protein, 9 aa, Homo sapiens
IKQSELSAK

SEQ ID NO: 2499 - protein, 7 aa, Homo sapiens
IKSLLPK

SEQ ID NO: 2500 - protein, 11 aa, Homo sapiens
IKSSFVAPLEK

SEQ ID NO: 2501 - protein, 21 aa, Homo sapiens
IKTDGAAPNVAPSDVGGGGGR

SEQ ID NO: 2502 - protein, 15 aa, Homo sapiens
IKVTTSQDMLSIMEK

SEQ ID NO: 2503 - protein, 13 aa, Homo sapiens
ILAGPAGDSNVVK

SEQ ID NO: 2504 - protein, 14 aa, Homo sapiens
ILANGLLQLGHGLK

SEQ ID NO: 2505 - protein, 14 aa, Homo sapiens
ILAQATSDLVNAIK

SEQ ID NO: 2506 - protein, 8 aa, Homo sapiens
ILDDLSPR

SEQ ID NO: 2507 - protein, 11 aa, Homo sapiens
ILDEIEEHNIK

SEQ ID NO: 2508 - protein, 19 aa, Homo sapiens
ILEAHQNVAQLSLAEAQLR

SEQ ID NO: 2509 - protein, 24 aa, Homo sapiens
ILEDMQEEDYLNFILFSGDVSTWK

SEQ ID NO: 2510 - protein, 13 aa, Homo sapiens
ILEENKELENALK

SEQ ID NO: 2511 - protein, 10 aa, Homo sapiens
ILEGFQPSGR

SEQ ID NO: 2512 - protein, 15 aa, Homo sapiens
ILFIFIDSDHTDNQR

SEQ ID NO: 2513 - protein, 6 aa, Homo sapiens
ILFNKK

SEQ ID NO: 2514 - protein, 6 aa, Homo sapiens
ILFSSR

SEQ ID NO: 2515 - protein, 7 aa, Homo sapiens
ILGAVAK

SEQ ID NO: 2516 - protein, 9 aa, Homo sapiens
ILGAVAKVR

SEQ ID NO: 2517 - protein, 19 aa, Homo sapiens
ILGDMQPGDYFDLVLFGTR

SEQ ID NO: 2518 - protein, 18 aa, Homo sapiens
ILGDPEALRDLLNNHILK

SEQ ID NO: 2519 - protein, 19 aa, Homo sapiens
ILGEELGFASLHDLQLLGK

SEQ ID NO: 2520 - protein, 26 aa, Homo sapiens
ILGEELGFASLHDLQLLGKLLLMGAR

SEQ ID NO: 2521 - protein, 9 aa, Homo sapiens
ILGGHLDAK

SEQ ID NO: 2522 - protein, 9 aa, Homo sapiens
ILGGSQVEK

SEQ ID NO: 2523 - protein, 14 aa, Homo sapiens
ILGGSVLHLVLALR

SEQ ID NO: 2524 - protein, 9 aa, Homo sapiens
ILGPLSYSK

SEQ ID NO: 2525 - protein, 6 aa, Homo sapiens
ILGVPR

SEQ ID NO: 2526 - protein, 11 aa, Homo sapiens
ILHLPTSWDWR

SEQ ID NO: 2527 - protein, 9 aa, Homo sapiens
ILIGTVFHK

SEQ ID NO: 2528 - protein, 5 aa, Homo sapiens
ILILR

SEQ ID NO: 2529 - protein, 7 aa, Homo sapiens
ILINLMK

SEQ ID NO: 2530 - protein, 5 aa, Homo sapiens
ILLFK

SEQ ID NO: 2531 - protein, 5 aa, Homo sapiens
ILLFR

SEQ ID NO: 2532 - protein, 9 aa, Homo sapiens
ILLGGYQSR

SEQ ID NO: 2533 - protein, 5 aa, Homo sapiens
ILLIK

SEQ ID NO: 2534 - protein, 5 aa, Homo sapiens
ILLLK

SEQ ID NO: 2535 - protein, 5 aa, Homo sapiens
ILLLR

SEQ ID NO: 2536 - protein, 8 aa, Homo sapiens
ILLNIEHR

SEQ ID NO: 2537 - protein, 9 aa, Homo sapiens
ILLNPQSHK

SEQ ID NO: 2538 - protein, 6 aa, Homo sapiens
ILLTPR

SEQ ID NO: 2539 - protein, 6 aa, Homo sapiens
ILLVAK

SEQ ID NO: 2540 - protein, 7 aa, Homo sapiens
ILLVAKR

SEQ ID NO: 2541 - protein, 5 aa, Homo sapiens
ILLYR

SEQ ID NO: 2542 - protein, 12 aa, Homo sapiens
ILLYTMNPNKFR

SEQ ID NO: 2543 - protein, 18 aa, Homo sapiens
ILNNGHAFNVEFDDSQDK

SEQ ID NO: 2544 - protein, 6 aa, Homo sapiens
ILNPLR

SEQ ID NO: 2545 - protein, 8 aa, Homo sapiens
ILPLTVCK

SEQ ID NO: 2546 - protein, 5 aa, Homo sapiens
ILQLK

SEQ ID NO: 2547 - protein, 10 aa, Homo sapiens
ILSGDPYCEK

SEQ ID NO: 2548 - protein, 14 aa, Homo sapiens
ILSGRPPLGFLNPR

SEQ ID NO: 2549 - protein, 5 aa, Homo sapiens
ILSLR

SEQ ID NO: 2550 - protein, 5 aa, Homo sapiens
ILSVK

SEQ ID NO: 2551 - protein, 6 aa, Homo sapiens
ILTLPR

SEQ ID NO: 2552 - protein, 5 aa, Homo sapiens
ILTQR

SEQ ID NO: 2553 - protein, 5 aa, Homo sapiens
ILTSK

SEQ ID NO: 2554 - protein, 8 aa, Homo sapiens
ILTTGFSR

SEQ ID NO: 2555 - protein, 6 aa, Homo sapiens
ILVGNK

SEQ ID NO: 2556 - protein, 5 aa, Homo sapiens
ILVGR

SEQ ID NO: 2557 - protein, 6 aa, Homo sapiens
ILVINK

SEQ ID NO: 2558 - protein, 5 aa, Homo sapiens
ILWSR

SEQ ID NO: 2559 - protein, 11 aa, Homo sapiens
IMADSGPIYDK

SEQ ID NO: 2560 - protein, 6 aa, Homo sapiens
IMALEK

SEQ ID NO: 2561 - protein, 9 aa, Homo sapiens
IMGITLVSK

SEQ ID NO: 2562 - protein, 10 aa, Homo sapiens
IMGITLVSKK

SEQ ID NO: 2563 - protein, 11 aa, Homo sapiens
IMGPNYTPGKK

SEQ ID NO: 2564 - protein, 6 aa, Homo sapiens
IMNMIK

SEQ ID NO: 2565 - protein, 10 aa, Homo sapiens
IMQSSQSMSK

SEQ ID NO: 2566 - protein, 13 aa, Homo sapiens
IMYTVFEHTFHVR

SEQ ID NO: 2567 - protein, 5 aa, Homo sapiens
INAAK

SEQ ID NO: 2568 - protein, 6 aa, Homo sapiens
INCQGK

SEQ ID NO: 2569 - protein, 11 aa, Homo sapiens
INCQGKTYLFK

SEQ ID NO: 2570 - protein, 9 aa, Homo sapiens
INDVLEHVK

SEQ ID NO: 2571 - protein, 5 aa, Homo sapiens
INEIR

SEQ ID NO: 2572 - protein, 6 aa, Homo sapiens
INELLK

SEQ ID NO: 2573 - protein, 12 aa, Homo sapiens
INENTGSVSVTR

SEQ ID NO: 2574 - protein, 5 aa, Homo sapiens
INEVK

SEQ ID NO: 2575 - protein, 6 aa, Homo sapiens
INFNEK

SEQ ID NO: 2576 - protein, 11 aa, Homo sapiens
INHGILYDEEK

SEQ ID NO: 2577 - protein, 12 aa, Homo sapiens
INNQLTLDSNTK

SEQ ID NO: 2578 - protein, 16 aa, Homo sapiens
INNQLTLDSNTKYFHK

SEQ ID NO: 2579 - protein, 7 aa, Homo sapiens
INPLALK

SEQ ID NO: 2580 - protein, 6 aa, Homo sapiens
INTEEK

SEQ ID NO: 2581 - protein, 5 aa, Homo sapiens
INTSR

SEQ ID NO: 2582 - protein, 13 aa, Homo sapiens
INVGGGLSGDHCK

SEQ ID NO: 2583 - protein, 14 aa, Homo sapiens
INVGGGLSGDHCKK

SEQ ID NO: 2584 - protein, 10 aa, Homo sapiens
INVKVGGNSK

SEQ ID NO: 2585 - protein, 6 aa, Homo sapiens
INVLQK

SEQ ID NO: 2586 - protein, 23 aa, Homo sapiens
IPEAPAGPPSDFGLFLSDDDPKK

SEQ ID NO: 2587 - protein, 5 aa, Homo sapiens
IPEAR

SEQ ID NO: 2588 - protein, 7 aa, Homo sapiens
IPEASPK

SEQ ID NO: 2589 - protein, 7 aa, Homo sapiens
IPEATNR

SEQ ID NO: 2590 - protein, 8 aa, Homo sapiens
IPEATNRR

SEQ ID NO: 2591 - protein, 15 aa, Homo sapiens
IPGIFELGISSQSDR

SEQ ID NO: 2592 - protein, 17 aa, Homo sapiens
IPGIFELGISSQSDRGK

SEQ ID NO: 2593 - protein, 11 aa, Homo sapiens
IPKPEASFSPR

SEQ ID NO: 2594 - protein, 8 aa, Homo sapiens
IPLDLVPK

SEQ ID NO: 2595 - protein, 8 aa, Homo sapiens
IPLNDLFR

SEQ ID NO: 2596 - protein, 5 aa, Homo sapiens
IPLPR

SEQ ID NO: 2597 - protein, 6 aa, Homo sapiens
IPLQPK

SEQ ID NO: 2598 - protein, 8 aa, Homo sapiens
IPLSPVHK

SEQ ID NO: 2599 - protein, 5 aa, Homo sapiens
IPLSR

SEQ ID NO: 2600 - protein, 8 aa, Homo sapiens
IPMFIVHK

SEQ ID NO: 2601 - protein, 13 aa, Homo sapiens
IPNEGHISHFQGK

SEQ ID NO: 2602 - protein, 5 aa, Homo sapiens
IPPLR

SEQ ID NO: 2603 - protein, 6 aa, Homo sapiens
IPSNPR

SEQ ID NO: 2604 - protein, 8 aa, Homo sapiens
IPSNPSHR

SEQ ID NO: 2605 - protein, 9 aa, Homo sapiens
IPSVQINFK

SEQ ID NO: 2606 - protein, 9 aa, Homo sapiens
IPTISTQLK

SEQ ID NO: 2607 - protein, 15 aa, Homo sapiens
IPVDEEAFVIDFKPR

SEQ ID NO: 2608 - protein, 11 aa, Homo sapiens
IPVHPNDHVNK

SEQ ID NO: 2609 - protein, 5 aa, Homo sapiens
IPVKK

SEQ ID NO: 2610 - protein, 7 aa, Homo sapiens
IPVPVAK

SEQ ID NO: 2611 - protein, 7 aa, Homo sapiens
IPYSFFK

SEQ ID NO: 2612 - protein, 16 aa, Homo sapiens
IPYYNIHPMPVHLQQR

SEQ ID NO: 2613 - protein, 8 aa, Homo sapiens
IQAEEGDK

SEQ ID NO: 2614 - protein, 17 aa, Homo sapiens
IQALSLCSDQQSHLEFR

SEQ ID NO: 2615 - protein, 7 aa, Homo sapiens
IQDKLNK

SEQ ID NO: 2616 - protein, 6 aa, Homo sapiens
IQEAWK

SEQ ID NO: 2617 - protein, 7 aa, Homo sapiens
IQENTFK

SEQ ID NO: 2618 - protein, 6 aa, Homo sapiens
IQENVR

SEQ ID NO: 2619 - protein, 12 aa, Homo sapiens
IQENVRNAIGGK

SEQ ID NO: 2620 - protein, 10 aa, Homo sapiens
IQEVADELQK

SEQ ID NO: 2621 - protein, 22 aa, Homo sapiens
IQGQELSAYQAPSPPAHSGFHR

SEQ ID NO: 2622 - protein, 14 aa, Homo sapiens
IQHPFTVEEFVLPK

SEQ ID NO: 2623 - protein, 10 aa, Homo sapiens
IQHTVTASVR

SEQ ID NO: 2624 - protein, 10 aa, Homo sapiens
IQIGIYVEIK

SEQ ID NO: 2625 - protein, 6 aa, Homo sapiens
IQIQEK

SEQ ID NO: 2626 - protein, 16 aa, Homo sapiens
IQKLESDVSAQMEYCR

SEQ ID NO: 2627 - protein, 10 aa, Homo sapiens
IQLVEEELDR

SEQ ID NO: 2628 - protein, 14 aa, Homo sapiens
IQLVEEELDRAQER

SEQ ID NO: 2629 - protein, 10 aa, Homo sapiens
IQNILTEEPK

SEQ ID NO: 2630 - protein, 8 aa, Homo sapiens
IQNQFNLK

SEQ ID NO: 2631 - protein, 7 aa, Homo sapiens
IQNTLQK

SEQ ID NO: 2632 - protein, 15 aa, Homo sapiens
IQPSGGTNINEALLR

SEQ ID NO: 2633 - protein, 12 aa, Homo sapiens
IQQRQLLISHQR

SEQ ID NO: 2634 - protein, 14 aa, Homo sapiens
IQSSHNFQLESVNK

SEQ ID NO: 2635 - protein, 9 aa, Homo sapiens
IQTHSTTYR

SEQ ID NO: 2636 - protein, 6 aa, Homo sapiens
IQVYSR

SEQ ID NO: 2637 - protein, 19 aa, Homo sapiens
IQYQLVDISQDNALRDEMR

SEQ ID NO: 2638 - protein, 11 aa, Homo sapiens
IQYYCHEPYYK

SEQ ID NO: 2639 - protein, 14 aa, Homo sapiens
IREEGTDLEVTANR

SEQ ID NO: 2640 - protein, 8 aa, Homo sapiens
IREEYPDR

SEQ ID NO: 2641 - protein, 7 aa, Homo sapiens
IRLEPGK

SEQ ID NO: 2642 - protein, 9 aa, Homo sapiens
IRPAVGWGR

SEQ ID NO: 2643 - protein, 8 aa, Homo sapiens
IRPFFPQQ

SEQ ID NO: 2644 - protein, 13 aa, Homo sapiens
IRPHTFTGLSGLR

SEQ ID NO: 2645 - protein, 7 aa, Homo sapiens
IRPLVTQ

SEQ ID NO: 2646 - protein, 6 aa, Homo sapiens
IRPLWK

SEQ ID NO: 2647 - protein, 11 aa, Homo sapiens
IRPNDFIPNVI

SEQ ID NO: 2648 - protein, 6 aa, Homo sapiens
ISADKK

SEQ ID NO: 2649 - protein, 9 aa, Homo sapiens
ISASAEELR

SEQ ID NO: 2650 - protein, 15 aa, Homo sapiens
ISASSEVAFLSIQIK

SEQ ID NO: 2651 - protein, 9 aa, Homo sapiens
ISAVSLANR

SEQ ID NO: 2652 - protein, 9 aa, Homo sapiens
ISAVSVAER

SEQ ID NO: 2653 - protein, 8 aa, Homo sapiens
ISCTIANR

SEQ ID NO: 2654 - protein, 8 aa, Homo sapiens
ISEEDLRK

SEQ ID NO: 2655 - protein, 14 aa, Homo sapiens
ISEGLPALEFPNEK

SEQ ID NO: 2656 - protein, 10 aa, Homo sapiens
ISEITNIVSK

SEQ ID NO: 2657 - protein, 6 aa, Homo sapiens
ISELIK

SEQ ID NO: 2658 - protein, 8 aa, Homo sapiens
ISFDEFIK

SEQ ID NO: 2659 - protein, 12 aa, Homo sapiens
ISHVWQSAGISK

SEQ ID NO: 2660 - protein, 17 aa, Homo sapiens
ISIEMHGTLEDQLSHLR

SEQ ID NO: 2661 - protein, 5 aa, Homo sapiens
ISIMK

SEQ ID NO: 2662 - protein, 6 aa, Homo sapiens
ISLGPR

SEQ ID NO: 2663 - protein, 8 aa, Homo sapiens
ISLPESLK

SEQ ID NO: 2664 - protein, 9 aa, Homo sapiens
ISLPESLKR

SEQ ID NO: 2665 - protein, 14 aa, Homo sapiens
ISLPLGSEERPFLR

SEQ ID NO: 2666 - protein, 7 aa, Homo sapiens
ISLQWLR

SEQ ID NO: 2667 - protein, 11 aa, Homo sapiens
ISLSGVHHFAR

SEQ ID NO: 2668 - protein, 6 aa, Homo sapiens
ISMLEK

SEQ ID NO: 2669 - protein, 12 aa, Homo sapiens
ISMLEKIYIHPR

SEQ ID NO: 2670 - protein, 6 aa, Homo sapiens
ISNIIK

SEQ ID NO: 2671 - protein, 10 aa, Homo sapiens
ISNIPDEYFK

SEQ ID NO: 2672 - protein, 6 aa, Homo sapiens
ISNLLK

SEQ ID NO: 2673 - protein, 6 aa, Homo sapiens
ISPEGK

SEQ ID NO: 2674 - protein, 9 aa, Homo sapiens
ISPFASDIR

SEQ ID NO: 2675 - protein, 6 aa, Homo sapiens
ISPNPK

SEQ ID NO: 2676 - protein, 20 aa, Homo sapiens
ISQHLDFISIMTYDFHGAWR

SEQ ID NO: 2677 - protein, 6 aa, Homo sapiens
ISQLTR

SEQ ID NO: 2678 - protein, 10 aa, Homo sapiens
ISSLTSEIMK

SEQ ID NO: 2679 - protein, 9 aa, Homo sapiens
ISVAQGASK

SEQ ID NO: 2680 - protein, 5 aa, Homo sapiens
ISVDK

SEQ ID NO: 2681 - protein, 5 aa, Homo sapiens
ISVFK

SEQ ID NO: 2682 - protein, 8 aa, Homo sapiens
ISVIRPSK

SEQ ID NO: 2683 - protein, 17 aa, Homo sapiens
ISVTQPDSIVGIVAVDK

SEQ ID NO: 2684 - protein, 7 aa, Homo sapiens
ITANLFR

SEQ ID NO: 2685 - protein, 13 aa, Homo sapiens
ITCTEEGWSPTPK

SEQ ID NO: 2686 - protein, 6 aa, Homo sapiens
ITDLIK

SEQ ID NO: 2687 - protein, 23 aa, Homo sapiens
ITDLIKDLDSQTMMVLVNYIFFK

SEQ ID NO: 2688 - protein, 16 aa, Homo sapiens
ITDNMFCAGYKPDEGK

SEQ ID NO: 2689 - protein, 17 aa, Homo sapiens
ITDNMFCAGYKPDEGKR

SEQ ID NO: 2690 - protein, 25 aa, Homo sapiens
ITDVIPSEAINELTVLVLVNTIYFK

SEQ ID NO: 2691 - protein, 29 aa, Homo sapiens
ITDVIPSEAINELTVLVLVNTIYFKGLWK

SEQ ID NO: 2692 - protein, 6 aa, Homo sapiens
ITEATK

SEQ ID NO: 2693 - protein, 14 aa, Homo sapiens
ITENDIQIALDDAK

SEQ ID NO: 2694 - protein, 12 aa, Homo sapiens
ITFELVYEELLK

SEQ ID NO: 2695 - protein, 13 aa, Homo sapiens
ITFELVYEELLKR

SEQ ID NO: 2696 - protein, 12 aa, Homo sapiens
ITFMCNDHYILK

SEQ ID NO: 2697 - protein, 8 aa, Homo sapiens
ITFTLSHR

SEQ ID NO: 2698 - protein, 9 aa, Homo sapiens
ITGFLKPGK

SEQ ID NO: 2699 - protein, 7 aa, Homo sapiens
ITGKPIK

SEQ ID NO: 2700 - protein, 7 aa, Homo sapiens
ITGYIIK

SEQ ID NO: 2701 - protein, 16 aa, Homo sapiens
ITGYIIKYEKPGSPPR

SEQ ID NO: 2702 - protein, 9 aa, Homo sapiens
ITHVHVHMR

SEQ ID NO: 2703 - protein, 11 aa, Homo sapiens
ITHYNYLILSK

SEQ ID NO: 2704 - protein, 5 aa, Homo sapiens
ITIPR

SEQ ID NO: 2705 - protein, 5 aa, Homo sapiens
ITISK

SEQ ID NO: 2706 - protein, 7 aa, Homo sapiens
ITKDILK

SEQ ID NO: 2707 - protein, 15 aa, Homo sapiens
ITKPALLVLNHETAK

SEQ ID NO: 2708 - protein, 21 aa, Homo sapiens
ITLIINWLQEALSSASLAHMK

SEQ ID NO: 2709 - protein, 11 aa, Homo sapiens
ITLLSALVETR

SEQ ID NO: 2710 - protein, 15 aa, Homo sapiens
ITLLSALVETRTIVR

SEQ ID NO: 2711 - protein, 7 aa, Homo sapiens
ITLPDFR

SEQ ID NO: 2712 - protein, 18 aa, Homo sapiens
ITLPVDFVTADKFDENAK

SEQ ID NO: 2713 - protein, 5 aa, Homo sapiens
ITLSK

SEQ ID NO: 2714 - protein, 5 aa, Homo sapiens
ITLSR

SEQ ID NO: 2715 - protein, 6 aa, Homo sapiens
ITLWNR

SEQ ID NO: 2716 - protein, 25 aa, Homo sapiens
ITPGKPYILTVPGHLDEMQLDIQAR

SEQ ID NO: 2717 - protein, 14 aa, Homo sapiens
ITPNLAEFAFSLYR

SEQ ID NO: 2718 - protein, 14 aa, Homo sapiens
ITPSYVAFTPEGER

SEQ ID NO: 2719 - protein, 11 aa, Homo sapiens
ITPTITNFALR

SEQ ID NO: 2720 - protein, 8 aa, Homo sapiens
ITQDAQLK

SEQ ID NO: 2721 - protein, 9 aa, Homo sapiens
ITQVLHFTK

SEQ ID NO: 2722 - protein, 12 aa, Homo sapiens
ITQVLHFTKDVK

SEQ ID NO: 2723 - protein, 10 aa, Homo sapiens
ITSGLHSFGR

SEQ ID NO: 2724 - protein, 5 aa, Homo sapiens
ITTAK

SEQ ID NO: 2725 - protein, 28 aa, Homo sapiens
ITTGGDVINNGLWNMVSVEELEHSISIK

SEQ ID NO: 2726 - protein, 12 aa, Homo sapiens
ITTTSPWMFPSR

SEQ ID NO: 2727 - protein, 5 aa, Homo sapiens
ITVIR

SEQ ID NO: 2728 - protein, 5 aa, Homo sapiens
ITVLR

SEQ ID NO: 2729 - protein, 19 aa, Homo sapiens
ITVVAGEHNIEETEHTEQK

SEQ ID NO: 2730 - protein, 20 aa, Homo sapiens
ITVVAGEHNIEETEHTEQKR

SEQ ID NO: 2731 - protein, 13 aa, Homo sapiens
ITVVDALHEIPVK

SEQ ID NO: 2732 - protein, 21 aa, Homo sapiens
ITYGETGGNSPVQEFTVPGSK

SEQ ID NO: 2733 - protein, 45 aa, Homo sapiens
ITYGETGGNSPVQEFTVPGSKSTATISGLKPGVDYTITVYAVTGR

SEQ ID NO: 2734 - protein, 20 aa, Homo sapiens
ITYYHLSFPTNIQAPAVVFR

SEQ ID NO: 2735 - protein, 11 aa, Homo sapiens
IVACASYKPSR

SEQ ID NO: 2736 - protein, 14 aa, Homo sapiens
IVADKDYSVTANSK

SEQ ID NO: 2737 - protein, 6 aa, Homo sapiens
IVAIKK

SEQ ID NO: 2738 - protein, 6 aa, Homo sapiens
IVAPGK

SEQ ID NO: 2739 - protein, 14 aa, Homo sapiens
IVATKPLYVALAQR

SEQ ID NO: 2740 - protein, 5 aa, Homo sapiens
IVDGK

SEQ ID NO: 2741 - protein, 23 aa, Homo sapiens
IVDLFSGLDSPAILVLVNYIFFK

SEQ ID NO: 2742 - protein, 6 aa, Homo sapiens
IVDLIK

SEQ ID NO: 2743 - protein, 6 aa, Homo sapiens
IVDLLK

SEQ ID NO: 2744 - protein, 6 aa, Homo sapiens
IVDLVK

SEQ ID NO: 2745 - protein, 9 aa, Homo sapiens
IVDLVSELK

SEQ ID NO: 2746 - protein, 10 aa, Homo sapiens
IVDLVSELKK

SEQ ID NO: 2747 - protein, 14 aa, Homo sapiens
IVFPHGITLDLVSR

SEQ ID NO: 2748 - protein, 5 aa, Homo sapiens
IVGGK

SEQ ID NO: 2749 - protein, 15 aa, Homo sapiens
IVHEYIGGYIFLSTR

SEQ ID NO: 2750 - protein, 10 aa, Homo sapiens
IVHVGLVQNR

SEQ ID NO: 2751 - protein, 8 aa, Homo sapiens
IVIEYVDR

SEQ ID NO: 2752 - protein, 13 aa, Homo sapiens
IVLGQEQDSYGGK

SEQ ID NO: 2753 - protein, 16 aa, Homo sapiens
IVLGQEQDSYGGKFDR

SEQ ID NO: 2754 - protein, 5 aa, Homo sapiens
IVLIR

SEQ ID NO: 2755 - protein, 8 aa, Homo sapiens
IVLISGRR

SEQ ID NO: 2756 - protein, 5 aa, Homo sapiens
IVLLR

SEQ ID NO: 2757 - protein, 7 aa, Homo sapiens
IVLVDNK

SEQ ID NO: 2758 - protein, 5 aa, Homo sapiens
IVNLK

SEQ ID NO: 2759 - protein, 7 aa, Homo sapiens
IVNLKEK

SEQ ID NO: 2760 - protein, 6 aa, Homo sapiens
IVNVLK

SEQ ID NO: 2761 - protein, 14 aa, Homo sapiens
IVQILPWEQNEQVK

SEQ ID NO: 2762 - protein, 6 aa, Homo sapiens
IVQIYK

SEQ ID NO: 2763 - protein, 10 aa, Homo sapiens
IVQIYKDLLR

SEQ ID NO: 2764 - protein, 9 aa, Homo sapiens
IVQLIQDTR

SEQ ID NO: 2765 - protein, 10 aa, Homo sapiens
IVQSHQQTGR

SEQ ID NO: 2766 - protein, 10 aa, Homo sapiens
IVSSAMEPDR

SEQ ID NO: 2767 - protein, 19 aa, Homo sapiens
IVSSAMEPDREYHFGQAVR

SEQ ID NO: 2768 - protein, 14 aa, Homo sapiens
IVVEDVDEPPVFSK

SEQ ID NO: 2769 - protein, 6 aa, Homo sapiens
IVVEEK

SEQ ID NO: 2770 - protein, 9 aa, Homo sapiens
IVVVTAGVR

SEQ ID NO: 2771 - protein, 7 aa, Homo sapiens
IWDVVEK

SEQ ID NO: 2772 - protein, 11 aa, Homo sapiens
IWHHTFYNELR

SEQ ID NO: 2773 - protein, 7 aa, Homo sapiens
IWLDNVR

SEQ ID NO: 2774 - protein, 7 aa, Homo sapiens
IYAILGK

SEQ ID NO: 2775 - protein, 44 aa, Homo sapiens
IYEDHDATQQLQGFYSQVAKPLLVDVDLQYPQDAVLALTQNHHK

SEQ ID NO: 2776 - protein, 11 aa, Homo sapiens
IYEGAYHVLHK

SEQ ID NO: 2777 - protein, 12 aa, Homo sapiens
IYGNQDTSSQLK

SEQ ID NO: 2778 - protein, 13 aa, Homo sapiens
IYGNQDTSSQLKK

SEQ ID NO: 2779 - protein, 10 aa, Homo sapiens
IYGPSDSASR

SEQ ID NO: 2780 - protein, 8 aa, Homo sapiens
IYGQRQWK

SEQ ID NO: 2781 - protein, 10 aa, Homo sapiens
IYHSHIDAPK

SEQ ID NO: 2782 - protein, 6 aa, Homo sapiens
IYIHPR

SEQ ID NO: 2783 - protein, 14 aa, Homo sapiens
IYISGMAPRPSLAK

SEQ ID NO: 2784 - protein, 15 aa, Homo sapiens
IYISGMAPRPSLAKK

SEQ ID NO: 2785 - protein, 7 aa, Homo sapiens
IYLQPGR

SEQ ID NO: 2786 - protein, 8 aa, Homo sapiens
IYLSDNLK

SEQ ID NO: 2787 - protein, 11 aa, Homo sapiens
IYLYTLNDNAR

SEQ ID NO: 2788 - protein, 15 aa, Homo sapiens
IYMADLESALHYILR

SEQ ID NO: 2789 - protein, 17 aa, Homo sapiens
IYPTVNCQPLGMISLMK

SEQ ID NO: 2790 - protein, 13 aa, Homo sapiens
IYSGILNLSDITK

SEQ ID NO: 2791 - protein, 6 aa, Homo sapiens
IYSILK

SEQ ID NO: 2792 - protein, 10 aa, Homo sapiens
IYSLWEHSTK

SEQ ID NO: 2793 - protein, 19 aa, Homo sapiens
IYTSPTWSAFVTDSSWSAR

SEQ ID NO: 2794 - protein, 13 aa, Homo sapiens
IYVDDGLISLQVK

SEQ ID NO: 2795 - protein, 13 aa, Homo sapiens
IYWYQQKPGSLPR

SEQ ID NO: 2796 - protein, 7 aa, Homo sapiens
IYYNGDK

SEQ ID NO: 2797 - protein, 14 aa, Homo sapiens
KAADDTWEPFASGK

SEQ ID NO: 2798 - protein, 6 aa, Homo sapiens
KAAIEK

SEQ ID NO: 2799 - protein, 13 aa, Homo sapiens
KAAISGENAGLVR

SEQ ID NO: 2800 - protein, 6 aa, Homo sapiens
KAALEK

SEQ ID NO: 2801 - protein, 12 aa, Homo sapiens
KADGSYAAWLSR

SEQ ID NO: 2802 - protein, 21 aa, Homo sapiens
KAEEEHLGILGPQLHADVGDK

SEQ ID NO: 2803 - protein, 14 aa, Homo sapiens
KAEGAATEEEGTPK

SEQ ID NO: 2804 - protein, 10 aa, Homo sapiens
KAETGDTVLK

SEQ ID NO: 2805 - protein, 10 aa, Homo sapiens
KAFDICPLVK

SEQ ID NO: 2806 - protein, 23 aa, Homo sapiens
KAGTELVNFLSYFVELGTQPATQ

SEQ ID NO: 2807 - protein, 8 aa, Homo sapiens
KALSDAIK

SEQ ID NO: 2808 - protein, 13 aa, Homo sapiens
KALYLQYTDETFR

SEQ ID NO: 2809 - protein, 11 aa, Homo sapiens
KAMAVEDIISR

SEQ ID NO: 2810 - protein, 9 aa, Homo sapiens
KAPPSQPPR

SEQ ID NO: 2811 - protein, 11 aa, Homo sapiens
KAQQELEEQTR

SEQ ID NO: 2812 - protein, 14 aa, Homo sapiens
KASDAEGDVAALNR

SEQ ID NO: 2813 - protein, 9 aa, Homo sapiens
KASYLDCIR

SEQ ID NO: 2814 - protein, 14 aa, Homo sapiens
KATDAEADVASLNR

SEQ ID NO: 2815 - protein, 11 aa, Homo sapiens
KATEDEGSEQK

SEQ ID NO: 2816 - protein, 10 aa, Homo sapiens
KATVVYQGER

SEQ ID NO: 2817 - protein, 28 aa, Homo sapiens
KDDIMLDEGMLQSLMELPDQYNYGMYAK

SEQ ID NO: 2818 - protein, 17 aa, Homo sapiens
KDDPLTNLNTAFDVAEK

SEQ ID NO: 2819 - protein, 11 aa, Homo sapiens
KDEILGIANNR

SEQ ID NO: 2820 - protein, 17 aa, Homo sapiens
KDGTHVVENVDATHIGK

SEQ ID NO: 2821 - protein, 15 aa, Homo sapiens
KDHSGQVFSVVSNGK

SEQ ID NO: 2822 - protein, 8 aa, Homo sapiens
KDLESIIK

SEQ ID NO: 2823 - protein, 22 aa, Homo sapiens
KDLYANTVLSGGTTMYPGIADR

SEQ ID NO: 2824 - protein, 9 aa, Homo sapiens
KDNEQHVFK

SEQ ID NO: 2825 - protein, 14 aa, Homo sapiens
KDNSVHWERPQKPK

SEQ ID NO: 2826 - protein, 29 aa, Homo sapiens
KDPEGLFLQDNIVAEFSVDETGQMSATAK

SEQ ID NO: 2827 - protein, 11 aa, Homo sapiens
KDSGFQMNQLR

SEQ ID NO: 2828 - protein, 7 aa, Homo sapiens
KDSSFIR

SEQ ID NO: 2829 - protein, 7 aa, Homo sapiens
KDSSLCK

SEQ ID NO: 2830 - protein, 17 aa, Homo sapiens
KDTVIKPLLVEPEGLEK

SEQ ID NO: 2831 - protein, 10 aa, Homo sapiens
KDVGRPQPGR

SEQ ID NO: 2832 - protein, 10 aa, Homo sapiens
KDVLETFTVK

SEQ ID NO: 2833 - protein, 14 aa, Homo sapiens
KDVLMVLVNYIYFK

SEQ ID NO: 2834 - protein, 11 aa, Homo sapiens
KEAESSPFVER

SEQ ID NO: 2835 - protein, 17 aa, Homo sapiens
KEAGIPEFYDYDVALIK

SEQ ID NO: 2836 - protein, 17 aa, Homo sapiens
KEDLVFIFWAPESAPLK

SEQ ID NO: 2837 - protein, 11 aa, Homo sapiens
KEEELQAALAR

SEQ ID NO: 2838 - protein, 10 aa, Homo sapiens
KEEFHEQSFR

SEQ ID NO: 2839 - protein, 10 aa, Homo sapiens
KEFDHNSNIR

SEQ ID NO: 2840 - protein, 8 aa, Homo sapiens
KEFQEGLK

SEQ ID NO: 2841 - protein, 18 aa, Homo sapiens
KEGGLGPLNIPLLADVTR

SEQ ID NO: 2842 - protein, 20 aa, Homo sapiens
KEGYSNISYIVVNHQGISSR

SEQ ID NO: 2843 - protein, 15 aa, Homo sapiens
KELELQIGNALFIGK

SEQ ID NO: 2844 - protein, 11 aa, Homo sapiens
KELNSFLESQK

SEQ ID NO: 2845 - protein, 9 aa, Homo sapiens
KELSSFIDK

SEQ ID NO: 2846 - protein, 10 aa, Homo sapiens
KEMQPTHPIR

SEQ ID NO: 2847 - protein, 14 aa, Homo sapiens
KETFDVTLEPLSFK

SEQ ID NO: 2848 - protein, 8 aa, Homo sapiens
KEVPVAIK

SEQ ID NO: 2849 - protein, 6 aa, Homo sapiens
KEVYIK

SEQ ID NO: 2850 - protein, 26 aa, Homo sapiens
KEVYMPSSIFQDDFVIPDISEPGTWK

SEQ ID NO: 2851 - protein, 6 aa, Homo sapiens
KEYEMK

SEQ ID NO: 2852 - protein, 20 aa, Homo sapiens
KFDLGQDVIDFTGHALALYR

SEQ ID NO: 2853 - protein, 10 aa, Homo sapiens
KFDQLLAEEK

SEQ ID NO: 2854 - protein, 11 aa, Homo sapiens
KFGPVVAPKPK

SEQ ID NO: 2855 - protein, 6 aa, Homo sapiens
KFIFTR

SEQ ID NO: 2856 - protein, 5 aa, Homo sapiens
KFIQK

SEQ ID NO: 2857 - protein, 7 aa, Homo sapiens
KFLLYAR

SEQ ID NO: 2858 - protein, 15 aa, Homo sapiens
KFPSGTFEQVSQLVK

SEQ ID NO: 2859 - protein, 17 aa, Homo sapiens
KFSEWGNNAFFYYFEHR

SEQ ID NO: 2860 - protein, 16 aa, Homo sapiens
KFSLDALITHVLPFEK

SEQ ID NO: 2861 - protein, 16 aa, Homo sapiens
KFSYSSGHVHLSSENK

SEQ ID NO: 2862 - protein, 8 aa, Homo sapiens
KFVAVLAK

SEQ ID NO: 2863 - protein, 9 aa, Homo sapiens
KFVIKPIDK

SEQ ID NO: 2864 - protein, 6 aa, Homo sapiens
KFVQGK

SEQ ID NO: 2865 - protein, 12 aa, Homo sapiens
KFYNQVSTPLLR

SEQ ID NO: 2866 - protein, 8 aa, Homo sapiens
KGDIYNEK

SEQ ID NO: 2867 - protein, 22 aa, Homo sapiens
KGDVVIVLTGWRPGSGFTNTMR

SEQ ID NO: 2868 - protein, 9 aa, Homo sapiens
KGEITGEVR

SEQ ID NO: 2869 - protein, 21 aa, Homo sapiens
KGEVLPLPEANFPSFPLPHHK

SEQ ID NO: 2870 - protein, 11 aa, Homo sapiens
KGEWVALNPLR

SEQ ID NO: 2871 - protein, 14 aa, Homo sapiens
KGGDGIKPPPIIGR

SEQ ID NO: 2872 - protein, 21 aa, Homo sapiens
KGGETSEMYLIQPDSSVKPYR

SEQ ID NO: 2873 - protein, 9 aa, Homo sapiens
KGGVASGFK

SEQ ID NO: 2874 - protein, 23 aa, Homo sapiens
KGHIYQGSEADSVFSGFLIFPSA

SEQ ID NO: 2875 - protein, 14 aa, Homo sapiens
KGHVSFKPSLDQQR

SEQ ID NO: 2876 - protein, 27 aa, Homo sapiens
KGISTSAASPAVGTVGMDMDEDDDFSK

SEQ ID NO: 2877 - protein, 19 aa, Homo sapiens
KGIVDQSQQAYQEAFEISK

SEQ ID NO: 2878 - protein, 12 aa, Homo sapiens
KGIYSFNFHVVK

SEQ ID NO: 2879 - protein, 14 aa, Homo sapiens
KGLEQLLVGGSHLK

SEQ ID NO: 2880 - protein, 11 aa, Homo sapiens
KGNFNYIEFTR

SEQ ID NO: 2881 - protein, 12 aa, Homo sapiens
KGNVATEISTER

SEQ ID NO: 2882 - protein, 8 aa, Homo sapiens
KGPAAIQK

SEQ ID NO: 2883 - protein, 15 aa, Homo sapiens
KGPGPGGPGGAGVAR

SEQ ID NO: 2884 - protein, 11 aa, Homo sapiens
KGQAVDYEGSR

SEQ ID NO: 2885 - protein, 16 aa, Homo sapiens
KGQFPILSITWEHAGR

SEQ ID NO: 2886 - protein, 9 aa, Homo sapiens
KGSLHANGR

SEQ ID NO: 2887 - protein, 18 aa, Homo sapiens
KGSPVNSLFVAPAVTPVK

SEQ ID NO: 2888 - protein, 11 aa, Homo sapiens
KGTLTEGGTQK

SEQ ID NO: 2889 - protein, 8 aa, Homo sapiens
KGTVVAEK

SEQ ID NO: 2890 - protein, 13 aa, Homo sapiens
KGVCEETSGAYEK

SEQ ID NO: 2891 - protein, 6 aa, Homo sapiens
KGVELK

SEQ ID NO: 2892 - protein, 18 aa, Homo sapiens
KGVNLPGAAVDLPAVSEK

SEQ ID NO: 2893 - protein, 10 aa, Homo sapiens
KGYTQQLAFR

SEQ ID NO: 2894 - protein, 15 aa, Homo sapiens
KHEAFESDLAAHQDR

SEQ ID NO: 2895 - protein, 23 aa, Homo sapiens
KIDAAQNWLADPNGGPEGEEQIR

SEQ ID NO: 2896 - protein, 7 aa, Homo sapiens
KIDELNK

SEQ ID NO: 2897 - protein, 8 aa, Homo sapiens
KIEEIAAK

SEQ ID NO: 2898 - protein, 8 aa, Homo sapiens
KIESFGSK

SEQ ID NO: 2899 - protein, 7 aa, Homo sapiens
KIFQAHK

SEQ ID NO: 2900 - protein, 5 aa, Homo sapiens
KIIFK

SEQ ID NO: 2901 - protein, 11 aa, Homo sapiens
KIISDYHQQFR

SEQ ID NO: 2902 - protein, 21 aa, Homo sapiens
KILHVDNHIGISIAGLTADAR

SEQ ID NO: 2903 - protein, 12 aa, Homo sapiens
KIMADSGPIYDK

SEQ ID NO: 2904 - protein, 8 aa, Homo sapiens
KINVIVLR

SEQ ID NO: 2905 - protein, 7 aa, Homo sapiens
KIPVVFR

SEQ ID NO: 2906 - protein, 15 aa, Homo sapiens
KIQALQQQADEAEDR

SEQ ID NO: 2907 - protein, 10 aa, Homo sapiens
KIQASTMAFK

SEQ ID NO: 2908 - protein, 6 aa, Homo sapiens
KIQIQR

SEQ ID NO: 2909 - protein, 6 aa, Homo sapiens
KIQQTR

SEQ ID NO: 2910 - protein, 8 aa, Homo sapiens
KIQTQLQR

SEQ ID NO: 2911 - protein, 19 aa, Homo sapiens
KISSIQSIVPALEIANAHR

SEQ ID NO: 2912 - protein, 11 aa, Homo sapiens
KITAIITQGCK

SEQ ID NO: 2913 - protein, 13 aa, Homo sapiens
KIVGAMVQIITYR

SEQ ID NO: 2914 - protein, 6 aa, Homo sapiens
KIVNAK

SEQ ID NO: 2915 - protein, 5 aa, Homo sapiens
KIVQK

SEQ ID NO: 2916 - protein, 7 aa, Homo sapiens
KIYLDEK

SEQ ID NO: 2917 - protein, 18 aa, Homo sapiens
KIYPTVNCQPLGMISLMK

SEQ ID NO: 2918 - protein, 8 aa, Homo sapiens
KKPGIYTR

SEQ ID NO: 2919 - protein, 9 aa, Homo sapiens
KLAGDESAD

SEQ ID NO: 2920 - protein, 11 aa, Homo sapiens
KLAVNMVPFPR

SEQ ID NO: 2921 - protein, 8 aa, Homo sapiens
KLCMAALK

SEQ ID NO: 2922 - protein, 9 aa, Homo sapiens
KLCQGLFFR

SEQ ID NO: 2923 - protein, 10 aa, Homo sapiens
KLDGICWQVR

SEQ ID NO: 2924 - protein, 9 aa, Homo sapiens
KLEAMTNSK

SEQ ID NO: 2925 - protein, 24 aa, Homo sapiens
KLEFALLFLVFDENESWYLDDNIK

SEQ ID NO: 2926 - protein, 8 aa, Homo sapiens
KLELHLPK

SEQ ID NO: 2927 - protein, 8 aa, Homo sapiens
KLEQLKPR

SEQ ID NO: 2928 - protein, 6 aa, Homo sapiens
KLEQTK

SEQ ID NO: 2929 - protein, 7 aa, Homo sapiens
KLESLLK

SEQ ID NO: 2930 - protein, 8 aa, Homo sapiens
KLFFFSGR

SEQ ID NO: 2931 - protein, 9 aa, Homo sapiens
KLFGTSGQK

SEQ ID NO: 2932 - protein, 8 aa, Homo sapiens
KLFPNFLK

SEQ ID NO: 2933 - protein, 19 aa, Homo sapiens
KLGLVFDDVVGIVEIINSK

SEQ ID NO: 2934 - protein, 19 aa, Homo sapiens
KLGQSLDCNAEVYVVPWEK

SEQ ID NO: 2935 - protein, 8 aa, Homo sapiens
KLGSYEHR

SEQ ID NO: 2936 - protein, 12 aa, Homo sapiens
KLIASMSSDSLR

SEQ ID NO: 2937 - protein, 8 aa, Homo sapiens
KLINDYVK

SEQ ID NO: 2938 - protein, 9 aa, Homo sapiens
KLIPITIIK

SEQ ID NO: 2939 - protein, 20 aa, Homo sapiens
KLISVDTEHSNIYLQNGPDR

SEQ ID NO: 2940 - protein, 7 aa, Homo sapiens
KLITSMR

SEQ ID NO: 2941 - protein, 5 aa, Homo sapiens
KLLFK

SEQ ID NO: 2942 - protein, 10 aa, Homo sapiens
KLLPDDPYEK

SEQ ID NO: 2943 - protein, 6 aa, Homo sapiens
KLLTFK

SEQ ID NO: 2944 - protein, 5 aa, Homo sapiens
KLLYK

SEQ ID NO: 2945 - protein, 12 aa, Homo sapiens
KLNAFGNAFLNR

SEQ ID NO: 2946 - protein, 16 aa, Homo sapiens
KLNQALLDLHALGSAR

SEQ ID NO: 2947 - protein, 9 aa, Homo sapiens
KLNVTEQEK

SEQ ID NO: 2948 - protein, 14 aa, Homo sapiens
KLPPGLLANFTLLR

SEQ ID NO: 2949 - protein, 13 aa, Homo sapiens
KLQSTTVMNPYMK

SEQ ID NO: 2950 - protein, 7 aa, Homo sapiens
KLQTDIK

SEQ ID NO: 2951 - protein, 7 aa, Homo sapiens
KLSELLR

SEQ ID NO: 2952 - protein, 27 aa, Homo sapiens
KLSENTDFLAPGVSSFTDSNQQESITK

SEQ ID NO: 2953 - protein, 16 aa, Homo sapiens
KLSFFCLAGYTTESGR

SEQ ID NO: 2954 - protein, 11 aa, Homo sapiens
KLSFYYLIMAK

SEQ ID NO: 2955 - protein, 10 aa, Homo sapiens
KLSSWVLLMK

SEQ ID NO: 2956 - protein, 6 aa, Homo sapiens
KLTIFK

SEQ ID NO: 2957 - protein, 11 aa, Homo sapiens
KLTISEQNIQR

SEQ ID NO: 2958 - protein, 12 aa, Homo sapiens
KLVAASQAALGL

SEQ ID NO: 2959 - protein, 11 aa, Homo sapiens
KLVDTLPQKPR

SEQ ID NO: 2960 - protein, 11 aa, Homo sapiens
KLVIIEGDLER

SEQ ID NO: 2961 - protein, 11 aa, Homo sapiens
KLVILEGELER

SEQ ID NO: 2962 - protein, 8 aa, Homo sapiens
KLVLSSEK

SEQ ID NO: 2963 - protein, 12 aa, Homo sapiens
KLVPFATELHER

SEQ ID NO: 2964 - protein, 15 aa, Homo sapiens
KLWAYLTINQLLAER

SEQ ID NO: 2965 - protein, 19 aa, Homo sapiens
KLYHSEAFTVNFGDTEEAK

SEQ ID NO: 2966 - protein, 5 aa, Homo sapiens
KLYLK

SEQ ID NO: 2967 - protein, 8 aa, Homo sapiens
KMDAHPPR

SEQ ID NO: 2968 - protein, 9 aa, Homo sapiens
KMEILHPGK

SEQ ID NO: 2969 - protein, 10 aa, Homo sapiens
KMGLAFESTK

SEQ ID NO: 2970 - protein, 8 aa, Homo sapiens
KMLEEIMK

SEQ ID NO: 2971 - protein, 5 aa, Homo sapiens
KMSMK

SEQ ID NO: 2972 - protein, 15 aa, Homo sapiens
KMTSNFPVDLSDYPK

SEQ ID NO: 2973 - protein, 12 aa, Homo sapiens
KMTVTDQVNCPK

SEQ ID NO: 2974 - protein, 16 aa, Homo sapiens
KMYFDAVQAIETHLIR

SEQ ID NO: 2975 - protein, 7 aa, Homo sapiens
KNAEELK

SEQ ID NO: 2976 - protein, 11 aa, Homo sapiens
KNEIDLESELK

SEQ ID NO: 2977 - protein, 5 aa, Homo sapiens
KNLYK

SEQ ID NO: 2978 - protein, 17 aa, Homo sapiens
KNQGILEFYGDDIALLK

SEQ ID NO: 2979 - protein, 8 aa, Homo sapiens
KNTPIDGK

SEQ ID NO: 2980 - protein, 7 aa, Homo sapiens
KNWIQYK

SEQ ID NO: 2981 - protein, 9 aa, Homo sapiens
KPAITYGTR

SEQ ID NO: 2982 - protein, 14 aa, Homo sapiens
KPALNLIYKPYQIR

SEQ ID NO: 2983 - protein, 15 aa, Homo sapiens
KPDGTLVSFTADFKK

SEQ ID NO: 2984 - protein, 12 aa, Homo sapiens
KPDGYDYYAFSK

SEQ ID NO: 2985 - protein, 11 aa, Homo sapiens
KPDQHFKPYLK

SEQ ID NO: 2986 - protein, 20 aa, Homo sapiens
KPDVSHGEMVSGFGPIYNYK

SEQ ID NO: 2987 - protein, 26 aa, Homo sapiens
KPDVSHGEMVSGFGPIYNYKDTIVFK

SEQ ID NO: 2988 - protein, 8 aa, Homo sapiens
KPELVNGR

SEQ ID NO: 2989 - protein, 9 aa, Homo sapiens
KPFLLLAIK

SEQ ID NO: 2990 - protein, 9 aa, Homo sapiens
KPFYLYTGR

SEQ ID NO: 2991 - protein, 7 aa, Homo sapiens
KPGASVK

SEQ ID NO: 2992 - protein, 7 aa, Homo sapiens
KPGATVK

SEQ ID NO: 2993 - protein, 15 aa, Homo sapiens
KPGINVASDWSIHLR

SEQ ID NO: 2994 - protein, 7 aa, Homo sapiens
KPGIYTR

SEQ ID NO: 2995 - protein, 10 aa, Homo sapiens
KPIIGILMQK

SEQ ID NO: 2996 - protein, 13 aa, Homo sapiens
KPIWLSQMSCSGR

SEQ ID NO: 2997 - protein, 20 aa, Homo sapiens
KPKMCPQLQQYEMHGPEGLR

SEQ ID NO: 2998 - protein, 10 aa, Homo sapiens
KPLNTEGVMK

SEQ ID NO: 2999 - protein, 18 aa, Homo sapiens
KPLTSSSAAPQRPISTQR

SEQ ID NO: 3000 - protein, 14 aa, Homo sapiens
KPPFSDKPSIPAGR

SEQ ID NO: 3001 - protein, 6 aa, Homo sapiens
KPPVPK

SEQ ID NO: 3002 - protein, 10 aa, Homo sapiens
KPQDFLEELK

SEQ ID NO: 3003 - protein, 7 aa, Homo sapiens
KPQSLTK

SEQ ID NO: 3004 - protein, 17 aa, Homo sapiens
KPSLSVQPGPVVAPGEK

SEQ ID NO: 3005 - protein, 17 aa, Homo sapiens
KPVAFSDYIHPVCLPDR

SEQ ID NO: 3006 - protein, 29 aa, Homo sapiens
KPVAFSDYIHPVCLPDRETAASLLQAGYK

SEQ ID NO: 3007 - protein, 7 aa, Homo sapiens
KPVDEYK

SEQ ID NO: 3008 - protein, 22 aa, Homo sapiens
KPVDEYKDCHLAQVPSHTVVAR

SEQ ID NO: 3009 - protein, 13 aa, Homo sapiens
KPVEEYANCHLAR

SEQ ID NO: 3010 - protein, 7 aa, Homo sapiens
KPYNFLK

SEQ ID NO: 3011 - protein, 15 aa, Homo sapiens
KPYNVESYTPQTQGK

SEQ ID NO: 3012 - protein, 21 aa, Homo sapiens
KPYNVESYTPQTQGKYEFILK

SEQ ID NO: 3013 - protein, 12 aa, Homo sapiens
KQELSEAEQATR

SEQ ID NO: 3014 - protein, 6 aa, Homo sapiens
KQGIQK

SEQ ID NO: 3015 - protein, 9 aa, Homo sapiens
KQINDYVEK

SEQ ID NO: 3016 - protein, 16 aa, Homo sapiens
KQISNLQQSISDAEQR

SEQ ID NO: 3017 - protein, 14 aa, Homo sapiens
KQLGAGSIEECAAK

SEQ ID NO: 3018 - protein, 8 aa, Homo sapiens
KQLVEIEK

SEQ ID NO: 3019 - protein, 8 aa, Homo sapiens
KQPYNNLK

SEQ ID NO: 3020 - protein, 15 aa, Homo sapiens
KQSEPLEITLLAPER

SEQ ID NO: 3021 - protein, 14 aa, Homo sapiens
KQTACKPEIAYAYK

SEQ ID NO: 3022 - protein, 10 aa, Homo sapiens
KQTALVELVK

SEQ ID NO: 3023 - protein, 11 aa, Homo sapiens
KQVTPLFIHFR

SEQ ID NO: 3024 - protein, 6 aa, Homo sapiens
KQWINK

SEQ ID NO: 3025 - protein, 12 aa, Homo sapiens
KSASDLTWDNLK

SEQ ID NO: 3026 - protein, 15 aa, Homo sapiens
KSDIDEIVLVGGSTR

SEQ ID NO: 3027 - protein, 6 aa, Homo sapiens
KSDLQK

SEQ ID NO: 3028 - protein, 18 aa, Homo sapiens
KSDVGFLPPFPTLDPEEK

SEQ ID NO: 3029 - protein, 10 aa, Homo sapiens
KSISAALEHK

SEQ ID NO: 3030 - protein, 8 aa, Homo sapiens
KSLSSMTR

SEQ ID NO: 3031 - protein, 16 aa, Homo sapiens
KSPQELLCGASLISDR

SEQ ID NO: 3032 - protein, 9 aa, Homo sapiens
KSQLVYQSR

SEQ ID NO: 3033 - protein, 11 aa, Homo sapiens
KSQPPPPQPAR

SEQ ID NO: 3034 - protein, 7 aa, Homo sapiens
KSSIIIR

SEQ ID NO: 3035 - protein, 11 aa, Homo sapiens
KSTVLQQQYNR

SEQ ID NO: 3036 - protein, 8 aa, Homo sapiens
KTALWITR

SEQ ID NO: 3037 - protein, 13 aa, Homo sapiens
KTANDMIHAENMR

SEQ ID NO: 3038 - protein, 30 aa, Homo sapiens
KTDELPQLVTLPHPNLHGPEILDVPSTVQK

SEQ ID NO: 3039 - protein, 16 aa, Homo sapiens
KTKPYIQVDIGGGQTK

SEQ ID NO: 3040 - protein, 8 aa, Homo sapiens
KTLEEEAK

SEQ ID NO: 3041 - protein, 11 aa, Homo sapiens
KTLLSNLEEAK

SEQ ID NO: 3042 - protein, 18 aa, Homo sapiens
KTLQALEFHTVPFQLLAR

SEQ ID NO: 3043 - protein, 11 aa, Homo sapiens
KTQIFLPMNFK

SEQ ID NO: 3044 - protein, 10 aa, Homo sapiens
KTQILVGVNK

SEQ ID NO: 3045 - protein, 13 aa, Homo sapiens
KTSLEDFYLDEER

SEQ ID NO: 3046 - protein, 13 aa, Homo sapiens
KTTVILPLAPFVR

SEQ ID NO: 3047 - protein, 30 aa, Homo sapiens
KVADALTNAVAHVDDMPNALSALSDLHAHK

SEQ ID NO: 3048 - protein, 9 aa, Homo sapiens
KVAQELEEK

SEQ ID NO: 3049 - protein, 12 aa, Homo sapiens
KVAVFFSNTPTR

SEQ ID NO: 3050 - protein, 9 aa, Homo sapiens
KVAVLVMGR

SEQ ID NO: 3051 - protein, 7 aa, Homo sapiens
KVEFVLK

SEQ ID NO: 3052 - protein, 18 aa, Homo sapiens
KVEGTAFVIFGIQDGEQR

SEQ ID NO: 3053 - protein, 13 aa, Homo sapiens
KVESELIKPINPR

SEQ ID NO: 3054 - protein, 29 aa, Homo sapiens
KVETNMAFSPFSIASLLTQVLLGAGENTK

SEQ ID NO: 3055 - protein, 11 aa, Homo sapiens
KVFASLPQVER

SEQ ID NO: 3056 - protein, 8 aa, Homo sapiens
KVFSGDGK

SEQ ID NO: 3057 - protein, 7 aa, Homo sapiens
KVGSQYR

SEQ ID NO: 3058 - protein, 17 aa, Homo sapiens
KVGTASENVYVNTAHLK

SEQ ID NO: 3059 - protein, 9 aa, Homo sapiens
KVHVIFNYK

SEQ ID NO: 3060 - protein, 5 aa, Homo sapiens
KVIEK

SEQ ID NO: 3061 - protein, 16 aa, Homo sapiens
KVIVIPVGIGPHANLK

SEQ ID NO: 3062 - protein, 5 aa, Homo sapiens
KVLEK

SEQ ID NO: 3063 - protein, 17 aa, Homo sapiens
KVLGAFSDGLAHLDNLK

SEQ ID NO: 3064 - protein, 11 aa, Homo sapiens
KVLLDGVQNPR

SEQ ID NO: 3065 - protein, 14 aa, Homo sapiens
KVMYTQYEDESFTK

SEQ ID NO: 3066 - protein, 10 aa, Homo sapiens
KVNLGVGAYR

SEQ ID NO: 3067 - protein, 15 aa, Homo sapiens
KVPQVSTPTLVEVSR

SEQ ID NO: 3068 - protein, 19 aa, Homo sapiens
KVQYAPERPGPQPTAETTR

SEQ ID NO: 3069 - protein, 19 aa, Homo sapiens
KVSPHSGVVALTKPVPEPR

SEQ ID NO: 3070 - protein, 11 aa, Homo sapiens
KVTCTNAELVK

SEQ ID NO: 3071 - protein, 18 aa, Homo sapiens
KVTHAVVTVPAYFNDAQR

SEQ ID NO: 3072 - protein, 8 aa, Homo sapiens
KVTSEDLK

SEQ ID NO: 3073 - protein, 14 aa, Homo sapiens
KVVATTQMQAADAR

SEQ ID NO: 3074 - protein, 8 aa, Homo sapiens
KVVTVLVR

SEQ ID NO: 3075 - protein, 8 aa, Homo sapiens
KVYLSECK

SEQ ID NO: 3076 - protein, 6 aa, Homo sapiens
KWDPYK

SEQ ID NO: 3077 - protein, 17 aa, Homo sapiens
KWGQLLLPSLLDLHLPR

SEQ ID NO: 3078 - protein, 9 aa, Homo sapiens
KWLTFSLGK

SEQ ID NO: 3079 - protein, 10 aa, Homo sapiens
KWQEEMELYR

SEQ ID NO: 3080 - protein, 14 aa, Homo sapiens
KWWTQAQAHDLVIK

SEQ ID NO: 3081 - protein, 7 aa, Homo sapiens
KYAFELK

SEQ ID NO: 3082 - protein, 8 aa, Homo sapiens
KYEDEINK

SEQ ID NO: 3083 - protein, 7 aa, Homo sapiens
KYEEVAR

SEQ ID NO: 3084 - protein, 9 aa, Homo sapiens
KYFIDFVAR

SEQ ID NO: 3085 - protein, 8 aa, Homo sapiens
KYLYEIAR

SEQ ID NO: 3086 - protein, 7 aa, Homo sapiens
KYNELLK

SEQ ID NO: 3087 - protein, 23 aa, Homo sapiens
KYNPIPSVQLMGNGFHFLAGEPR

SEQ ID NO: 3088 - protein, 16 aa, Homo sapiens
KYNSQNQSNNQFVLYR

SEQ ID NO: 3089 - protein, 13 aa, Homo sapiens
KYPVAHFIDQTLK

SEQ ID NO: 3090 - protein, 21 aa, Homo sapiens
KYQPNIDVQESIHFLESEFSR

SEQ ID NO: 3091 - protein, 16 aa, Homo sapiens
KYSQFINFPIYVWSSK

SEQ ID NO: 3092 - protein, 17 aa, Homo sapiens
KYTPEQVAMATVTALHR

SEQ ID NO: 3093 - protein, 21 aa, Homo sapiens
KYTYNYEAESSSGVPGTADSR

SEQ ID NO: 3094 - protein, 10 aa, Homo sapiens
KYVLPNFEVK

SEQ ID NO: 3095 - protein, 12 aa, Homo sapiens
KYWNDCEPPDSR

SEQ ID NO: 3096 - protein, 8 aa, Homo sapiens
LAAALGIR

SEQ ID NO: 3097 - protein, 14 aa, Homo sapiens
LAAAVSNFGYDLYR

SEQ ID NO: 3098 - protein, 7 aa, Homo sapiens
LAADDFR

SEQ ID NO: 3099 - protein, 9 aa, Homo sapiens
LAAFGQLHK

SEQ ID NO: 3100 - protein, 18 aa, Homo sapiens
LAALNPESNTAGLDIFAK

SEQ ID NO: 3101 - protein, 9 aa, Homo sapiens
LAAYLMLMR

SEQ ID NO: 3102 - protein, 7 aa, Homo sapiens
LADDLYR

SEQ ID NO: 3103 - protein, 11 aa, Homo sapiens
LADGGATNQGR

SEQ ID NO: 3104 - protein, 6 aa, Homo sapiens
LADVVK

SEQ ID NO: 3105 - protein, 11 aa, Homo sapiens
LAEGFPLPLLK

SEQ ID NO: 3106 - protein, 12 aa, Homo sapiens
LAEGFPLPLLKR

SEQ ID NO: 3107 - protein, 7 aa, Homo sapiens
LAEYHAK

SEQ ID NO: 3108 - protein, 13 aa, Homo sapiens
LAGAPSEDPQFPK

SEQ ID NO: 3109 - protein, 11 aa, Homo sapiens
LAGIINFQRPK

SEQ ID NO: 3110 - protein, 14 aa, Homo sapiens
LAGLDAGLHQLHVR

SEQ ID NO: 3111 - protein, 19 aa, Homo sapiens
LAGYLHTLVQNLVNNGYVR

SEQ ID NO: 3112 - protein, 12 aa, Homo sapiens
LAILGIHNEVSK

SEQ ID NO: 3113 - protein, 7 aa, Homo sapiens
LAIPEGK

SEQ ID NO: 3114 - protein, 18 aa, Homo sapiens
LAKHLEVDVWVIEPQGLR

SEQ ID NO: 3115 - protein, 11 aa, Homo sapiens
LAKTYETTLEK

SEQ ID NO: 3116 - protein, 11 aa, Homo sapiens
LALDIEIATYR

SEQ ID NO: 3117 - protein, 11 aa, Homo sapiens
LALDLEIATYR

SEQ ID NO: 3118 - protein, 10 aa, Homo sapiens
LALDNGGLAR

SEQ ID NO: 3119 - protein, 12 aa, Homo sapiens
LALETALMYGAK

SEQ ID NO: 3120 - protein, 6 aa, Homo sapiens
LALNPR

SEQ ID NO: 3121 - protein, 14 aa, Homo sapiens
LALWGEHTGQLYSK

SEQ ID NO: 3122 - protein, 8 aa, Homo sapiens
LANNTTVK

SEQ ID NO: 3123 - protein, 16 aa, Homo sapiens
LANVMMGPYRQDLLAK

SEQ ID NO: 3124 - protein, 5 aa, Homo sapiens
LAPGK

SEQ ID NO: 3125 - protein, 9 aa, Homo sapiens
LAPLAEDVR

SEQ ID NO: 3126 - protein, 14 aa, Homo sapiens
LAQANGWGVMVSHR

SEQ ID NO: 3127 - protein, 10 aa, Homo sapiens
LAQGLTHLGK

SEQ ID NO: 3128 - protein, 26 aa, Homo sapiens
LAQKVPTADLEDVLPLAEDITNILSK

SEQ ID NO: 3129 - protein, 14 aa, Homo sapiens
LAQVAKAVTQALNR

SEQ ID NO: 3130 - protein, 22 aa, Homo sapiens
LASEAKPAAVAAENEEIGSHIK

SEQ ID NO: 3131 - protein, 6 aa, Homo sapiens
LASHLR

SEQ ID NO: 3132 - protein, 11 aa, Homo sapiens
LASLFPALFSR

SEQ ID NO: 3133 - protein, 17 aa, Homo sapiens
LASPGFPGEYANDQERR

SEQ ID NO: 3134 - protein, 8 aa, Homo sapiens
LASVSVSR

SEQ ID NO: 3135 - protein, 7 aa, Homo sapiens
LASYLDK

SEQ ID NO: 3136 - protein, 7 aa, Homo sapiens
LATALQK

SEQ ID NO: 3137 - protein, 10 aa, Homo sapiens
LATALSLSNK

SEQ ID NO: 3138 - protein, 19 aa, Homo sapiens
LAVTTHGLPCLAWASAQAK

SEQ ID NO: 3139 - protein, 9 aa, Homo sapiens
LAVYQAGAR

SEQ ID NO: 3140 - protein, 8 aa, Homo sapiens
LCDNLSTK

SEQ ID NO: 3141 - protein, 8 aa, Homo sapiens
LCFFYNKK

SEQ ID NO: 3142 - protein, 7 aa, Homo sapiens
LCMAALK

SEQ ID NO: 3143 - protein, 11 aa, Homo sapiens
LCQDLGPGAFR

SEQ ID NO: 3144 - protein, 7 aa, Homo sapiens
LCSGFVR

SEQ ID NO: 3145 - protein, 8 aa, Homo sapiens
LCTPLLPK

SEQ ID NO: 3146 - protein, 8 aa, Homo sapiens
LCTVATLR

SEQ ID NO: 3147 - protein, 22 aa, Homo sapiens
LDAHKVLSALQAVQGLLVAQGR

SEQ ID NO: 3148 - protein, 10 aa, Homo sapiens
LDAQASFLPK

SEQ ID NO: 3149 - protein, 18 aa, Homo sapiens
LDDDLEHQGGHVLDHGHK

SEQ ID NO: 3150 - protein, 12 aa, Homo sapiens
LDDGRWHQVEVK

SEQ ID NO: 3151 - protein, 6 aa, Homo sapiens
LDEILK

SEQ ID NO: 3152 - protein, 9 aa, Homo sapiens
LDELRDEGK

SEQ ID NO: 3153 - protein, 12 aa, Homo sapiens
LDEVKEQVAEVR

SEQ ID NO: 3154 - protein, 9 aa, Homo sapiens
LDFHFSSDR

SEQ ID NO: 3155 - protein, 13 aa, Homo sapiens
LDFLRPYTVPNKK

SEQ ID NO: 3156 - protein, 10 aa, Homo sapiens
LDFSSQADLR

SEQ ID NO: 3157 - protein, 14 aa, Homo sapiens
LDFSSQADLRNEIK

SEQ ID NO: 3158 - protein, 11 aa, Homo sapiens
LDGKFSVVYAK

SEQ ID NO: 3159 - protein, 6 aa, Homo sapiens
LDGQFR

SEQ ID NO: 3160 - protein, 8 aa, Homo sapiens
LDGSVDFK

SEQ ID NO: 3161 - protein, 9 aa, Homo sapiens
LDGSVDFKK

SEQ ID NO: 3162 - protein, 7 aa, Homo sapiens
LDHLAEK

SEQ ID NO: 3163 - protein, 6 aa, Homo sapiens
LDIAGR

SEQ ID NO: 3164 - protein, 7 aa, Homo sapiens
LDKMVTK

SEQ ID NO: 3165 - protein, 6 aa, Homo sapiens
LDLAGR

SEQ ID NO: 3166 - protein, 7 aa, Homo sapiens
LDLLEDR

SEQ ID NO: 3167 - protein, 15 aa, Homo sapiens
LDLQEINNWVQAQMK

SEQ ID NO: 3168 - protein, 9 aa, Homo sapiens
LDLSLNRLK

SEQ ID NO: 3169 - protein, 6 aa, Homo sapiens
LDLTEK

SEQ ID NO: 3170 - protein, 13 aa, Homo sapiens
LDLTEKDYEILFK

SEQ ID NO: 3171 - protein, 9 aa, Homo sapiens
LDNIYSSDK

SEQ ID NO: 3172 - protein, 12 aa, Homo sapiens
LDNIYSSDKFYK

SEQ ID NO: 3173 - protein, 12 aa, Homo sapiens
LDPHNHVLYSNR

SEQ ID NO: 3174 - protein, 36 aa, Homo sapiens
LDQIESVITATSANTQLVLETLAQMDDLQDFLSKDK

SEQ ID NO: 3175 - protein, 6 aa, Homo sapiens
LDQLEK

SEQ ID NO: 3176 - protein, 13 aa, Homo sapiens
LDQLIYIPLPDEK

SEQ ID NO: 3177 - protein, 18 aa, Homo sapiens
LDRENISEYHLTAVIVDK

SEQ ID NO: 3178 - protein, 6 aa, Homo sapiens
LDSELK

SEQ ID NO: 3179 - protein, 6 aa, Homo sapiens
LDTEDK

SEQ ID NO: 3180 - protein, 8 aa, Homo sapiens
LDTEDKLR

SEQ ID NO: 3181 - protein, 12 aa, Homo sapiens
LDTLAQEVALLK

SEQ ID NO: 3182 - protein, 6 aa, Homo sapiens
LDVDWR

SEQ ID NO: 3183 - protein, 14 aa, Homo sapiens
LDVDWRELNELGSK

SEQ ID NO: 3184 - protein, 16 aa, Homo sapiens
LDVPVWDVEATLNFLK

SEQ ID NO: 3185 - protein, 9 aa, Homo sapiens
LDVTTSIGR

SEQ ID NO: 3186 - protein, 10 aa, Homo sapiens
LDVTTSIGRR

SEQ ID NO: 3187 - protein, 5 aa, Homo sapiens
LEAIK

SEQ ID NO: 3188 - protein, 5 aa, Homo sapiens
LEALK

SEQ ID NO: 3189 - protein, 11 aa, Homo sapiens
LEALKENGGAR

SEQ ID NO: 3190 - protein, 12 aa, Homo sapiens
LEAVSHTSDMHR

SEQ ID NO: 3191 - protein, 8 aa, Homo sapiens
LEDFRDYR

SEQ ID NO: 3192 - protein, 14 aa, Homo sapiens
LEDMEQALSPSVFK

SEQ ID NO: 3193 - protein, 11 aa, Homo sapiens
LEDSVTYHCSR

SEQ ID NO: 3194 - protein, 6 aa, Homo sapiens
LEDTPK

SEQ ID NO: 3195 - protein, 6 aa, Homo sapiens
LEEAEK

SEQ ID NO: 3196 - protein, 18 aa, Homo sapiens
LEEHLEGIVNIFHQYSVR

SEQ ID NO: 3197 - protein, 9 aa, Homo sapiens
LEEQAQQIR

SEQ ID NO: 3198 - protein, 9 aa, Homo sapiens
LEEVLTNKK

SEQ ID NO: 3199 - protein, 24 aa, Homo sapiens
LEGSAPTDVLDSLTTIPELKDHLR

SEQ ID NO: 3200 - protein, 9 aa, Homo sapiens
LEGSINDIK

SEQ ID NO: 3201 - protein, 10 aa, Homo sapiens
LEHEYIHNFK

SEQ ID NO: 3202 - protein, 31 aa, Homo sapiens
LEIGQDLIQVAVAQYADTVRPEFYFNTHPTK

SEQ ID NO: 3203 - protein, 20 aa, Homo sapiens
LEIQSQVDSQHVGHSVLTAK

SEQ ID NO: 3204 - protein, 24 aa, Homo sapiens
LELELRPTGEIEQYSVSATYELQR

SEQ ID NO: 3205 - protein, 27 aa, Homo sapiens
LELELRPTGEIEQYSVSATYELQREDR

SEQ ID NO: 3206 - protein, 7 aa, Homo sapiens
LELHLPK

SEQ ID NO: 3207 - protein, 15 aa, Homo sapiens
LELHVDGPPPRPQLR

SEQ ID NO: 3208 - protein, 8 aa, Homo sapiens
LELLSLSK

SEQ ID NO: 3209 - protein, 6 aa, Homo sapiens
LELQEK

SEQ ID NO: 3210 - protein, 9 aa, Homo sapiens
LELSVDGAK

SEQ ID NO: 3211 - protein, 8 aa, Homo sapiens
LELWINLR

SEQ ID NO: 3212 - protein, 5 aa, Homo sapiens
LEMSK

SEQ ID NO: 3213 - protein, 15 aa, Homo sapiens
LEMSKFQPTLLTLPR

SEQ ID NO: 3214 - protein, 9 aa, Homo sapiens
LENEIQTYR

SEQ ID NO: 3215 - protein, 5 aa, Homo sapiens
LEPGK

SEQ ID NO: 3216 - protein, 40 aa, Homo sapiens
LEPGKEYLIMGLDGATYDLEGHPQYLLDSNSWIEEMPSER

SEQ ID NO: 3217 - protein, 11 aa, Homo sapiens
LEPGQQEEYYR

SEQ ID NO: 3218 - protein, 12 aa, Homo sapiens
LEPGQQEEYYRK

SEQ ID NO: 3219 - protein, 5 aa, Homo sapiens
LEPIK

SEQ ID NO: 3220 - protein, 5 aa, Homo sapiens
LEPLK

SEQ ID NO: 3221 - protein, 13 aa, Homo sapiens
LEPLKLHVAGNLK

SEQ ID NO: 3222 - protein, 9 aa, Homo sapiens
LEPYADQLR

SEQ ID NO: 3223 - protein, 9 aa, Homo sapiens
LEQEIATYR

SEQ ID NO: 3224 - protein, 17 aa, Homo sapiens
LEQFVSILMASIPLPDK

SEQ ID NO: 3225 - protein, 14 aa, Homo sapiens
LEQGENVFLQATDK

SEQ ID NO: 3226 - protein, 6 aa, Homo sapiens
LERELK

SEQ ID NO: 3227 - protein, 7 aa, Homo sapiens
LERLAAK

SEQ ID NO: 3228 - protein, 13 aa, Homo sapiens
LESDVSAQMEYCR

SEQ ID NO: 3229 - protein, 30 aa, Homo sapiens
LESEETMVLEAHDAQGDVPVTVTVHDFPGK

SEQ ID NO: 3230 - protein, 31 aa, Homo sapiens
LESEETMVLEAHDAQGDVPVTVTVHDFPGKK

SEQ ID NO: 3231 - protein, 10 aa, Homo sapiens
LETVLESIQK

SEQ ID NO: 3232 - protein, 8 aa, Homo sapiens
LEVDIDIK

SEQ ID NO: 3233 - protein, 14 aa, Homo sapiens
LEVHYHNPLVIEGR

SEQ ID NO: 3234 - protein, 5 aa, Homo sapiens
LEVIK

SEQ ID NO: 3235 - protein, 6 aa, Homo sapiens
LEVLHK

SEQ ID NO: 3236 - protein, 5 aa, Homo sapiens
LEVLK

SEQ ID NO: 3237 - protein, 6 aa, Homo sapiens
LEVLKR

SEQ ID NO: 3238 - protein, 18 aa, Homo sapiens
LEVLNFDFQANAQLSNPK

SEQ ID NO: 3239 - protein, 6 aa, Homo sapiens
LEVQIK

SEQ ID NO: 3240 - protein, 8 aa, Homo sapiens
LEYLLLSR

SEQ ID NO: 3241 - protein, 8 aa, Homo sapiens
LEYPTCAK

SEQ ID NO: 3242 - protein, 6 aa, Homo sapiens
LFAFVR

SEQ ID NO: 3243 - protein, 9 aa, Homo sapiens
LFAGLVHVK

SEQ ID NO: 3244 - protein, 15 aa, Homo sapiens
LFAVFERPQGSPAAR

SEQ ID NO: 3245 - protein, 9 aa, Homo sapiens
LFAYPDTHR

SEQ ID NO: 3246 - protein, 10 aa, Homo sapiens
LFDEINPETK

SEQ ID NO: 3247 - protein, 18 aa, Homo sapiens
LFDSDPITVTVPVEVSRK

SEQ ID NO: 3248 - protein, 8 aa, Homo sapiens
LFEHPLYR

SEQ ID NO: 3249 - protein, 5 aa, Homo sapiens
LFETK

SEQ ID NO: 3250 - protein, 14 aa, Homo sapiens
LFETKITQVLHFTK

SEQ ID NO: 3251 - protein, 13 aa, Homo sapiens
LFFGPQHRPVILR

SEQ ID NO: 3252 - protein, 7 aa, Homo sapiens
LFFLQVK

SEQ ID NO: 3253 - protein, 31 aa, Homo sapiens
LFGEVTSPLFPKPYPNNFETTTVITVPTGYR

SEQ ID NO: 3254 - protein, 14 aa, Homo sapiens
LFGGNFAHQASVAR

SEQ ID NO: 3255 - protein, 7 aa, Homo sapiens
LFGPDLK

SEQ ID NO: 3256 - protein, 21 aa, Homo sapiens
LFHTNFYDTVGTIQLINDHVK

SEQ ID NO: 3257 - protein, 22 aa, Homo sapiens
LFHTNFYDTVGTIQLINDHVKK

SEQ ID NO: 3258 - protein, 10 aa, Homo sapiens
LFINVAPHAR

SEQ ID NO: 3259 - protein, 23 aa, Homo sapiens
LFLEALVDSVAQGIPFQQHQFDK

SEQ ID NO: 3260 - protein, 7 aa, Homo sapiens
LFLEETK

SEQ ID NO: 3261 - protein, 14 aa, Homo sapiens
LFLEPTQADIALLK

SEQ ID NO: 3262 - protein, 7 aa, Homo sapiens
LFLEPTR

SEQ ID NO: 3263 - protein, 8 aa, Homo sapiens
LFLEPTRK

SEQ ID NO: 3264 - protein, 8 aa, Homo sapiens
LFLLTVHK

SEQ ID NO: 3265 - protein, 7 aa, Homo sapiens
LFPLPGR

SEQ ID NO: 3266 - protein, 7 aa, Homo sapiens
LFPNFLK

SEQ ID NO: 3267 - protein, 24 aa, Homo sapiens
LFQFHFHWGSTNEHGSEHTVDGVK

SEQ ID NO: 3268 - protein, 7 aa, Homo sapiens
LFQGLGK

SEQ ID NO: 3269 - protein, 15 aa, Homo sapiens
LFQGLGKLEYLLLSR

SEQ ID NO: 3270 - protein, 9 aa, Homo sapiens
LFQPLTHLK

SEQ ID NO: 3271 - protein, 12 aa, Homo sapiens
LFQVEYAIEAIK

SEQ ID NO: 3272 - protein, 5 aa, Homo sapiens
LFQVK

SEQ ID NO: 3273 - protein, 19 aa, Homo sapiens
LFSLKPTSGPVLTVTLFGR

SEQ ID NO: 3274 - protein, 5 aa, Homo sapiens
LFSVK

SEQ ID NO: 3275 - protein, 7 aa, Homo sapiens
LFTNFHR

SEQ ID NO: 3276 - protein, 7 aa, Homo sapiens
LFWEPMK

SEQ ID NO: 3277 - protein, 5 aa, Homo sapiens
LFYIK

SEQ ID NO: 3278 - protein, 5 aa, Homo sapiens
LFYLK

SEQ ID NO: 3279 - protein, 7 aa, Homo sapiens
LGATAEK

SEQ ID NO: 3280 - protein, 13 aa, Homo sapiens
LGDDLLQCHPAVK

SEQ ID NO: 3281 - protein, 13 aa, Homo sapiens
LGEVNTYAGDLQK

SEQ ID NO: 3282 - protein, 7 aa, Homo sapiens
LGEYDLR

SEQ ID NO: 3283 - protein, 9 aa, Homo sapiens
LGFTDLFSK

SEQ ID NO: 3284 - protein, 14 aa, Homo sapiens
LGGSAVISLEGKPL

SEQ ID NO: 3285 - protein, 9 aa, Homo sapiens
LGGSVPHLR

SEQ ID NO: 3286 - protein, 5 aa, Homo sapiens
LGGVK

SEQ ID NO: 3287 - protein, 14 aa, Homo sapiens
LGHGVNNAAGQVGK

SEQ ID NO: 3288 - protein, 8 aa, Homo sapiens
LGHLLHIR

SEQ ID NO: 3289 - protein, 11 aa, Homo sapiens
LGHLLHIRDEK

SEQ ID NO: 3290 - protein, 13 aa, Homo sapiens
LGHPDTLNQGEFK

SEQ ID NO: 3291 - protein, 25 aa, Homo sapiens
LGHPEALSAGTGSPQPPSFTYAQQR

SEQ ID NO: 3292 - protein, 14 aa, Homo sapiens
LGKDAVEDLESVGK

SEQ ID NO: 3293 - protein, 10 aa, Homo sapiens
LGMFNIQHCK

SEQ ID NO: 3294 - protein, 11 aa, Homo sapiens
LGMFNIQHCKK

SEQ ID NO: 3295 - protein, 15 aa, Homo sapiens
LGNFPWQAFTSIHGR

SEQ ID NO: 3296 - protein, 8 aa, Homo sapiens
LGNNPVSK

SEQ ID NO: 3297 - protein, 13 aa, Homo sapiens
LGNQEPGGQTALK

SEQ ID NO: 3298 - protein, 9 aa, Homo sapiens
LGPEAAVGR

SEQ ID NO: 3299 - protein, 17 aa, Homo sapiens
LGPHAGDVEGHLSFLEK

SEQ ID NO: 3300 - protein, 25 aa, Homo sapiens
LGPLSAEGTTGLAPAGQTSEESRPR

SEQ ID NO: 3301 - protein, 9 aa, Homo sapiens
LGPLVEQGR

SEQ ID NO: 3302 - protein, 15 aa, Homo sapiens
LGPNYLHIPVNCPYR

SEQ ID NO: 3303 - protein, 18 aa, Homo sapiens
LGQSLDCNAEVYVVPWEK

SEQ ID NO: 3304 - protein, 10 aa, Homo sapiens
LGQYASPTAK

SEQ ID NO: 3305 - protein, 11 aa, Homo sapiens
LGQYASPTAKR

SEQ ID NO: 3306 - protein, 10 aa, Homo sapiens
LGSGLQGEVK

SEQ ID NO: 3307 - protein, 17 aa, Homo sapiens
LGSLGAACEQTQTEGAK

SEQ ID NO: 3308 - protein, 13 aa, Homo sapiens
LGSLHPHTPYHIR

SEQ ID NO: 3309 - protein, 7 aa, Homo sapiens
LGSYEHR

SEQ ID NO: 3310 - protein, 8 aa, Homo sapiens
LGVNVTWK

SEQ ID NO: 3311 - protein, 13 aa, Homo sapiens
LGVRPSQGGEAPR

SEQ ID NO: 3312 - protein, 9 aa, Homo sapiens
LGVYELLLK

SEQ ID NO: 3313 - protein, 17 aa, Homo sapiens
LGVYELLLKVRPQQLVK

SEQ ID NO: 3314 - protein, 35 aa, Homo sapiens
LGWAMTSADLNQDGHGDLVVGAPGYSRPGHIHIGR

SEQ ID NO: 3315 - protein, 8 aa, Homo sapiens
LHAPLLTR

SEQ ID NO: 3316 - protein, 8 aa, Homo sapiens
LHAVPNLR

SEQ ID NO: 3317 - protein, 37 aa, Homo sapiens
LHDNQNGWSGDSAPVELILSDETLPAPEFSPEPESGR

SEQ ID NO: 3318 - protein, 18 aa, Homo sapiens
LHEAFSPVSYQHDLALLR

SEQ ID NO: 3319 - protein, 7 aa, Homo sapiens
LHELQEK

SEQ ID NO: 3320 - protein, 20 aa, Homo sapiens
LHFFMPGFAPLTAQGSQQYR

SEQ ID NO: 3321 - protein, 14 aa, Homo sapiens
LHFFMPGFAPLTSR

SEQ ID NO: 3322 - protein, 25 aa, Homo sapiens
LHHVSSLAWLDEHTLVTTSHDASVK

SEQ ID NO: 3323 - protein, 11 aa, Homo sapiens
LHIDDMEFEPK

SEQ ID NO: 3324 - protein, 13 aa, Homo sapiens
LHIDEMDSVPTVR

SEQ ID NO: 3325 - protein, 9 aa, Homo sapiens
LHILLQNGK

SEQ ID NO: 3326 - protein, 7 aa, Homo sapiens
LHIMAGR

SEQ ID NO: 3327 - protein, 9 aa, Homo sapiens
LHIVQVVCK

SEQ ID NO: 3328 - protein, 10 aa, Homo sapiens
LHIVQVVCKK

SEQ ID NO: 3329 - protein, 9 aa, Homo sapiens
LHKPGVYTR

SEQ ID NO: 3330 - protein, 7 aa, Homo sapiens
LHLEGNK

SEQ ID NO: 3331 - protein, 13 aa, Homo sapiens
LHLEGNKLQVLGK

SEQ ID NO: 3332 - protein, 25 aa, Homo sapiens
LHLEGYHGTAGDSMSYHSGSVFSAR

SEQ ID NO: 3333 - protein, 26 aa, Homo sapiens
LHLETDSLALVALGALDTALYAAGSK

SEQ ID NO: 3334 - protein, 35 aa, Homo sapiens
LHLETDSLALVALGALDTALYAAGSKSHKPLNMGK

SEQ ID NO: 3335 - protein, 28 aa, Homo sapiens
LHLLNIGGSQDIHVVHFHGQTLLENGNK

SEQ ID NO: 3336 - protein, 12 aa, Homo sapiens
LHLVALVGTQGR

SEQ ID NO: 3337 - protein, 9 aa, Homo sapiens
LHLYNSLTR

SEQ ID NO: 3338 - protein, 10 aa, Homo sapiens
LHMLQISYFR

SEQ ID NO: 3339 - protein, 11 aa, Homo sapiens
LHRPPVIVLQR

SEQ ID NO: 3340 - protein, 13 aa, Homo sapiens
LHSLHLEGSCLGR

SEQ ID NO: 3341 - protein, 14 aa, Homo sapiens
LHTDDELNWLDHGR

SEQ ID NO: 3342 - protein, 19 aa, Homo sapiens
LHTEAQIQEEGTVVELTGR

SEQ ID NO: 3343 - protein, 12 aa, Homo sapiens
LHTLGDNLLDSR

SEQ ID NO: 3344 - protein, 8 aa, Homo sapiens
LHVAGNLK

SEQ ID NO: 3345 - protein, 9 aa, Homo sapiens
LHVDPENFR

SEQ ID NO: 3346 - protein, 17 aa, Homo sapiens
LIALSIDSVEDHLAWSK

SEQ ID NO: 3347 - protein, 15 aa, Homo sapiens
LIALTLLGMGLALFR

SEQ ID NO: 3348 - protein, 10 aa, Homo sapiens
LIANTLCNSR

SEQ ID NO: 3349 - protein, 20 aa, Homo sapiens
LIDQYGTHYLQSGSLGGEYR

SEQ ID NO: 3350 - protein, 9 aa, Homo sapiens
LIDVISMYR

SEQ ID NO: 3351 - protein, 11 aa, Homo sapiens
LIENGYFHPVK

SEQ ID NO: 3352 - protein, 5 aa, Homo sapiens
LIFKK

SEQ ID NO: 3353 - protein, 7 aa, Homo sapiens
LIGDAAK

SEQ ID NO: 3354 - protein, 7 aa, Homo sapiens
LIHFSAK

SEQ ID NO: 3355 - protein, 19 aa, Homo sapiens
LIHHGVHHGANQAGSEAGK

SEQ ID NO: 3356 - protein, 8 aa, Homo sapiens
LIINSLYK

SEQ ID NO: 3357 - protein, 9 aa, Homo sapiens
LILDFLNSK

SEQ ID NO: 3358 - protein, 7 aa, Homo sapiens
LILEEFK

SEQ ID NO: 3359 - protein, 5 aa, Homo sapiens
LILFK

SEQ ID NO: 3360 - protein, 5 aa, Homo sapiens
LILFR

SEQ ID NO: 3361 - protein, 5 aa, Homo sapiens
LILIK

SEQ ID NO: 3362 - protein, 5 aa, Homo sapiens
LILLK

SEQ ID NO: 3363 - protein, 5 aa, Homo sapiens
LILLR

SEQ ID NO: 3364 - protein, 11 aa, Homo sapiens
LILPHVDIQLK

SEQ ID NO: 3365 - protein, 9 aa, Homo sapiens
LILQNHILK

SEQ ID NO: 3366 - protein, 10 aa, Homo sapiens
LILVDYILFK

SEQ ID NO: 3367 - protein, 5 aa, Homo sapiens
LILWR

SEQ ID NO: 3368 - protein, 5 aa, Homo sapiens
LILYK

SEQ ID NO: 3369 - protein, 7 aa, Homo sapiens
LILYPNK

SEQ ID NO: 3370 - protein, 7 aa, Homo sapiens
LINDYVK

SEQ ID NO: 3371 - protein, 7 aa, Homo sapiens
LINNAIK

SEQ ID NO: 3372 - protein, 10 aa, Homo sapiens
LINRPIIVFR

SEQ ID NO: 3373 - protein, 7 aa, Homo sapiens
LIPFVPK

SEQ ID NO: 3374 - protein, 19 aa, Homo sapiens
LIQDAVTGLTVNGQITGDK

SEQ ID NO: 3375 - protein, 12 aa, Homo sapiens
LIQEAPKPECEK

SEQ ID NO: 3376 - protein, 9 aa, Homo sapiens
LIQGAPTIR

SEQ ID NO: 3377 - protein, 10 aa, Homo sapiens
LISAQHNQSK

SEQ ID NO: 3378 - protein, 5 aa, Homo sapiens
LISLR

SEQ ID NO: 3379 - protein, 10 aa, Homo sapiens
LISPPVHLPR

SEQ ID NO: 3380 - protein, 19 aa, Homo sapiens
LISVDTEHSNIYLQNGPDR

SEQ ID NO: 3381 - protein, 5 aa, Homo sapiens
LISVK

SEQ ID NO: 3382 - protein, 10 aa, Homo sapiens
LITASGSYHK

SEQ ID NO: 3383 - protein, 10 aa, Homo sapiens
LITLEEEMTK

SEQ ID NO: 3384 - protein, 10 aa, Homo sapiens
LIVALMKPSR

SEQ ID NO: 3385 - protein, 11 aa, Homo sapiens
LIVAMSSWLQK

SEQ ID NO: 3386 - protein, 5 aa, Homo sapiens
LIVGR

SEQ ID NO: 3387 - protein, 11 aa, Homo sapiens
LIVHNGYCDGR

SEQ ID NO: 3388 - protein, 23 aa, Homo sapiens
LIVLVPPSKPTVNIPSSATIGNR

SEQ ID NO: 3389 - protein, 13 aa, Homo sapiens
LKCDEWSVNSVGK

SEQ ID NO: 3390 - protein, 10 aa, Homo sapiens
LKDDEVAQLK

SEQ ID NO: 3391 - protein, 6 aa, Homo sapiens
LKDPVK

SEQ ID NO: 3392 - protein, 11 aa, Homo sapiens
LKEDAVSAAFK

SEQ ID NO: 3393 - protein, 8 aa, Homo sapiens
LKEEEEDK

SEQ ID NO: 3394 - protein, 7 aa, Homo sapiens
LKEEIGK

SEQ ID NO: 3395 - protein, 7 aa, Homo sapiens
LKEELGK

SEQ ID NO: 3396 - protein, 7 aa, Homo sapiens
LKEEQLR

SEQ ID NO: 3397 - protein, 12 aa, Homo sapiens
LKEGMLSIMSYR

SEQ ID NO: 3398 - protein, 10 aa, Homo sapiens
LKELTLEDLK

SEQ ID NO: 3399 - protein, 9 aa, Homo sapiens
LKFIIPSPK

SEQ ID NO: 3400 - protein, 16 aa, Homo sapiens
LKGEMMDLQHGSLFLR

SEQ ID NO: 3401 - protein, 8 aa, Homo sapiens
LKGPLLNK

SEQ ID NO: 3402 - protein, 23 aa, Homo sapiens
LKHELTDEELQSLFTNFANVVDK

SEQ ID NO: 3403 - protein, 12 aa, Homo sapiens
LKLEPHEGLLLR

SEQ ID NO: 3404 - protein, 13 aa, Homo sapiens
LKLSILYPATTGR

SEQ ID NO: 3405 - protein, 11 aa, Homo sapiens
LKLSYEGEVTK

SEQ ID NO: 3406 - protein, 10 aa, Homo sapiens
LKNSLFEYQK

SEQ ID NO: 3407 - protein, 10 aa, Homo sapiens
LKPGAPLRPK

SEQ ID NO: 3408 - protein, 5 aa, Homo sapiens
LKPIK

SEQ ID NO: 3409 - protein, 17 aa, Homo sapiens
LKPKPIDVQVITHHMQR

SEQ ID NO: 3410 - protein, 5 aa, Homo sapiens
LKPLK

SEQ ID NO: 3411 - protein, 15 aa, Homo sapiens
LKPLLNTMIQSNYNR

SEQ ID NO: 3412 - protein, 6 aa, Homo sapiens
LKPVIK

SEQ ID NO: 3413 - protein, 11 aa, Homo sapiens
LKQHIEAIDVR

SEQ ID NO: 3414 - protein, 12 aa, Homo sapiens
LKQNDFNSVEEK

SEQ ID NO: 3415 - protein, 8 aa, Homo sapiens
LKTPITFR

SEQ ID NO: 3416 - protein, 10 aa, Homo sapiens
LKYENEVALR

SEQ ID NO: 3417 - protein, 6 aa, Homo sapiens
LLAAAR

SEQ ID NO: 3418 - protein, 21 aa, Homo sapiens
LLAALLEDEGGSGRPLLQAAK

SEQ ID NO: 3419 - protein, 13 aa, Homo sapiens
LLAGDHPIDLLLR

SEQ ID NO: 3420 - protein, 9 aa, Homo sapiens
LLAHQKPPK

SEQ ID NO: 3421 - protein, 9 aa, Homo sapiens
LLASYPHTR

SEQ ID NO: 3422 - protein, 9 aa, Homo sapiens
LLATVLSQK

SEQ ID NO: 3423 - protein, 14 aa, Homo sapiens
LLCQCLGFGSGHFR

SEQ ID NO: 3424 - protein, 8 aa, Homo sapiens
LLDFQKTK

SEQ ID NO: 3425 - protein, 14 aa, Homo sapiens
LLDHRVPQTDMTFR

SEQ ID NO: 3426 - protein, 14 aa, Homo sapiens
LLDNWDSVTSTFSK

SEQ ID NO: 3427 - protein, 10 aa, Homo sapiens
LLDSLPSDTR

SEQ ID NO: 3428 - protein, 12 aa, Homo sapiens
LLDSSTVTHLFK

SEQ ID NO: 3429 - protein, 15 aa, Homo sapiens
LLDSVEQDFHLEIAK

SEQ ID NO: 3430 - protein, 9 aa, Homo sapiens
LLELFPVNR

SEQ ID NO: 3431 - protein, 8 aa, Homo sapiens
LLELTGPK

SEQ ID NO: 3432 - protein, 14 aa, Homo sapiens
LLETIDQLYLEYAK

SEQ ID NO: 3433 - protein, 8 aa, Homo sapiens
LLEVPEGR

SEQ ID NO: 3434 - protein, 18 aa, Homo sapiens
LLFDGDAHLLMSIPSPFR

SEQ ID NO: 3435 - protein, 13 aa, Homo sapiens
LLFKGSEMVVAGK

SEQ ID NO: 3436 - protein, 5 aa, Homo sapiens
LLFKK

SEQ ID NO: 3437 - protein, 11 aa, Homo sapiens
LLGELLQDNAK

SEQ ID NO: 3438 - protein, 14 aa, Homo sapiens
LLGEVDHYQLALGK

SEQ ID NO: 3439 - protein, 7 aa, Homo sapiens
LLGHLVK

SEQ ID NO: 3440 - protein, 10 aa, Homo sapiens
LLGIETPLPK

SEQ ID NO: 3441 - protein, 9 aa, Homo sapiens
LLGLSLAGK

SEQ ID NO: 3442 - protein, 16 aa, Homo sapiens
LLGNVLVCVLAHHFGK

SEQ ID NO: 3443 - protein, 9 aa, Homo sapiens
LLIDSVHAR

SEQ ID NO: 3444 - protein, 5 aa, Homo sapiens
LLIFK

SEQ ID NO: 3445 - protein, 9 aa, Homo sapiens
LLIGTVFHK

SEQ ID NO: 3446 - protein, 5 aa, Homo sapiens
LLIIK

SEQ ID NO: 3447 - protein, 5 aa, Homo sapiens
LLIIR

SEQ ID NO: 3448 - protein, 9 aa, Homo sapiens
LLILEAGHR

SEQ ID NO: 3449 - protein, 5 aa, Homo sapiens
LLILK

SEQ ID NO: 3450 - protein, 5 aa, Homo sapiens
LLILR

SEQ ID NO: 3451 - protein, 7 aa, Homo sapiens
LLINLLK

SEQ ID NO: 3452 - protein, 6 aa, Homo sapiens
LLIQMK

SEQ ID NO: 3453 - protein, 9 aa, Homo sapiens
LLISLSEER

SEQ ID NO: 3454 - protein, 16 aa, Homo sapiens
LLIYAASSLQSGIPSR

SEQ ID NO: 3455 - protein, 18 aa, Homo sapiens
LLIYAVLPTGDVIGDSAK

SEQ ID NO: 3456 - protein, 9 aa, Homo sapiens
LLIYDASNR

SEQ ID NO: 3457 - protein, 9 aa, Homo sapiens
LLIYGASTR

SEQ ID NO: 3458 - protein, 5 aa, Homo sapiens
LLIYK

SEQ ID NO: 3459 - protein, 8 aa, Homo sapiens
LLIYKQGR

SEQ ID NO: 3460 - protein, 5 aa, Homo sapiens
LLIYR

SEQ ID NO: 3461 - protein, 10 aa, Homo sapiens
LLKPAVVGIK

SEQ ID NO: 3462 - protein, 7 aa, Homo sapiens
LLLDAMK

SEQ ID NO: 3463 - protein, 7 aa, Homo sapiens
LLLDMYK

SEQ ID NO: 3464 - protein, 7 aa, Homo sapiens
LLLEHYR

SEQ ID NO: 3465 - protein, 8 aa, Homo sapiens
LLLELHHR

SEQ ID NO: 3466 - protein, 5 aa, Homo sapiens
LLLFK

SEQ ID NO: 3467 - protein, 26 aa, Homo sapiens
LLLFSPSVVHLGVPLSVGVQLQDVPR

SEQ ID NO: 3468 - protein, 9 aa, Homo sapiens
LLLHFQSPR

SEQ ID NO: 3469 - protein, 5 aa, Homo sapiens
LLLIR

SEQ ID NO: 3470 - protein, 5 aa, Homo sapiens
LLLLK

SEQ ID NO: 3471 - protein, 5 aa, Homo sapiens
LLLLR

SEQ ID NO: 3472 - protein, 7 aa, Homo sapiens
LLLMGAR

SEQ ID NO: 3473 - protein, 8 aa, Homo sapiens
LLLPHWAK

SEQ ID NO: 3474 - protein, 9 aa, Homo sapiens
LLLQINPER

SEQ ID NO: 3475 - protein, 18 aa, Homo sapiens
LLLQMDSSATAYGSTVSK

SEQ ID NO: 3476 - protein, 19 aa, Homo sapiens
LLLQMDSSATAYGSTVSKR

SEQ ID NO: 3477 - protein, 9 aa, Homo sapiens
LLLQPSPQR

SEQ ID NO: 3478 - protein, 18 aa, Homo sapiens
LLLQQVSLPELPGEYSMK

SEQ ID NO: 3479 - protein, 9 aa, Homo sapiens
LLLSEQLSR

SEQ ID NO: 3480 - protein, 9 aa, Homo sapiens
LLLSPSVQR

SEQ ID NO: 3481 - protein, 14 aa, Homo sapiens
LLLSRGANINAFDK

SEQ ID NO: 3482 - protein, 9 aa, Homo sapiens
LLLSYGASR

SEQ ID NO: 3483 - protein, 7 aa, Homo sapiens
LLLVLNK

SEQ ID NO: 3484 - protein, 7 aa, Homo sapiens
LLLVMDK

SEQ ID NO: 3485 - protein, 10 aa, Homo sapiens
LLLYGLHHGK

SEQ ID NO: 3486 - protein, 5 aa, Homo sapiens
LLLYR

SEQ ID NO: 3487 - protein, 18 aa, Homo sapiens
LLNLDGTCADSYSFVFSR

SEQ ID NO: 3488 - protein, 10 aa, Homo sapiens
LLPAQLPAEK

SEQ ID NO: 3489 - protein, 11 aa, Homo sapiens
LLPHANEVSQK

SEQ ID NO: 3490 - protein, 6 aa, Homo sapiens
LLPVGR

SEQ ID NO: 3491 - protein, 21 aa, Homo sapiens
LLQDEFPGIPSPLDAAVECHR

SEQ ID NO: 3492 - protein, 13 aa, Homo sapiens
LLQKGWVDLFVPK

SEQ ID NO: 3493 - protein, 7 aa, Homo sapiens
LLQLLGR

SEQ ID NO: 3494 - protein, 8 aa, Homo sapiens
LLQLLQAK

SEQ ID NO: 3495 - protein, 26 aa, Homo sapiens
LLQLPLGFLYVHHTYVPAPPCTDFTR

SEQ ID NO: 3496 - protein, 8 aa, Homo sapiens
LLRPQILR

SEQ ID NO: 3497 - protein, 15 aa, Homo sapiens
LLSGGNTLHLVSTTK

SEQ ID NO: 3498 - protein, 26 aa, Homo sapiens
LLSGVLFHSSPALQPAADHKPGPGAR

SEQ ID NO: 3499 - protein, 5 aa, Homo sapiens
LLSIR

SEQ ID NO: 3500 - protein, 10 aa, Homo sapiens
LLSLGAGEFK

SEQ ID NO: 3501 - protein, 5 aa, Homo sapiens
LLSLR

SEQ ID NO: 3502 - protein, 5 aa, Homo sapiens
LLSVK

SEQ ID NO: 3503 - protein, 9 aa, Homo sapiens
LLTTEEKPR

SEQ ID NO: 3504 - protein, 6 aa, Homo sapiens
LLVGNK

SEQ ID NO: 3505 - protein, 10 aa, Homo sapiens
LLVVYPWTQR

SEQ ID NO: 3506 - protein, 27 aa, Homo sapiens
LLVYYIVTGEQTAELVSDSVWLNIEEK

SEQ ID NO: 3507 - protein, 5 aa, Homo sapiens
LLWSR

SEQ ID NO: 3508 - protein, 6 aa, Homo sapiens
LMELIR

SEQ ID NO: 3509 - protein, 11 aa, Homo sapiens
LMGAFASLDLK

SEQ ID NO: 3510 - protein, 5 aa, Homo sapiens
LMGIR

SEQ ID NO: 3511 - protein, 8 aa, Homo sapiens
LMLSYDLK

SEQ ID NO: 3512 - protein, 8 aa, Homo sapiens
LMNHYINK

SEQ ID NO: 3513 - protein, 7 aa, Homo sapiens
LMNIFLK

SEQ ID NO: 3514 - protein, 12 aa, Homo sapiens
LMQCLPNPEDVK

SEQ ID NO: 3515 - protein, 10 aa, Homo sapiens
LMVELHNLYR

SEQ ID NO: 3516 - protein, 5 aa, Homo sapiens
LNAAK

SEQ ID NO: 3517 - protein, 12 aa, Homo sapiens
LNDLEDALQQAK

SEQ ID NO: 3518 - protein, 26 aa, Homo sapiens
LNDLNSVLVMPTFHVPFTDLQVPSCK

SEQ ID NO: 3519 - protein, 16 aa, Homo sapiens
LNEHFLNTTDFLDTIK

SEQ ID NO: 3520 - protein, 8 aa, Homo sapiens
LNEREVVK

SEQ ID NO: 3521 - protein, 16 aa, Homo sapiens
LNFSHGTHEYHAETIK

SEQ ID NO: 3522 - protein, 13 aa, Homo sapiens
LNGEIQALELPQK

SEQ ID NO: 3523 - protein, 18 aa, Homo sapiens
LNGEIQALELPQKAEALK

SEQ ID NO: 3524 - protein, 8 aa, Homo sapiens
LNGESNLR

SEQ ID NO: 3525 - protein, 13 aa, Homo sapiens
LNHQLEGLTFQMK

SEQ ID NO: 3526 - protein, 7 aa, Homo sapiens
LNILNAK

SEQ ID NO: 3527 - protein, 14 aa, Homo sapiens
LNILNAKFAFNLYR

SEQ ID NO: 3528 - protein, 6 aa, Homo sapiens
LNINLK

SEQ ID NO: 3529 - protein, 12 aa, Homo sapiens
LNLAFIANLFNR

SEQ ID NO: 3530 - protein, 27 aa, Homo sapiens
LNLEVTALIEKPDIHFLEPLESGRPTR

SEQ ID NO: 3531 - protein, 10 aa, Homo sapiens
LNLTLSPAKK

SEQ ID NO: 3532 - protein, 19 aa, Homo sapiens
LNLVATPLFLKPGIPYPIK

SEQ ID NO: 3533 - protein, 6 aa, Homo sapiens
LNLVQR

SEQ ID NO: 3534 - protein, 12 aa, Homo sapiens
LNMGITDLQGLR

SEQ ID NO: 3535 - protein, 10 aa, Homo sapiens
LNNGEITQHR

SEQ ID NO: 3536 - protein, 11 aa, Homo sapiens
LNNGEITQHRK

SEQ ID NO: 3537 - protein, 15 aa, Homo sapiens
LNQALLDLHALGSAR

SEQ ID NO: 3538 - protein, 10 aa, Homo sapiens
LNQEVALNLK

SEQ ID NO: 3539 - protein, 30 aa, Homo sapiens
LNTDIAGLASAIDMSTNYNSDSLHFSNVFR

SEQ ID NO: 3540 - protein, 5 aa, Homo sapiens
LNTSR

SEQ ID NO: 3541 - protein, 9 aa, Homo sapiens
LNYKPPPQK

SEQ ID NO: 3542 - protein, 9 aa, Homo sapiens
LPALHIAAR

SEQ ID NO: 3543 - protein, 12 aa, Homo sapiens
LPANHPLLTGQR

SEQ ID NO: 3544 - protein, 8 aa, Homo sapiens
LPANLLYK

SEQ ID NO: 3545 - protein, 11 aa, Homo sapiens
LPASHATWMGK

SEQ ID NO: 3546 - protein, 12 aa, Homo sapiens
LPATEKPVLLSK

SEQ ID NO: 3547 - protein, 11 aa, Homo sapiens
LPDATPTELAK

SEQ ID NO: 3548 - protein, 5 aa, Homo sapiens
LPECR

SEQ ID NO: 3549 - protein, 7 aa, Homo sapiens
LPEEIQR

SEQ ID NO: 3550 - protein, 25 aa, Homo sapiens
LPEGSVSLIILLTDGDPTVGETNPR

SEQ ID NO: 3551 - protein, 45 aa, Homo sapiens
LPEIAIPEFIIPTLNLNDFQVPDLHIPEFQLPHISHTIEVPTFGK

SEQ ID NO: 3552 - protein, 15 aa, Homo sapiens
LPETIDLGALYLSMK

SEQ ID NO: 3553 - protein, 9 aa, Homo sapiens
LPFPIIDDR

SEQ ID NO: 3554 - protein, 9 aa, Homo sapiens
LPGIVAEGR

SEQ ID NO: 3555 - protein, 20 aa, Homo sapiens
LPGIVAEGRDDLYVSDAFHK

SEQ ID NO: 3556 - protein, 10 aa, Homo sapiens
LPGLHNSLVK

SEQ ID NO: 3557 - protein, 6 aa, Homo sapiens
LPGSSK

SEQ ID NO: 3558 - protein, 5 aa, Homo sapiens
LPIPR

SEQ ID NO: 3559 - protein, 5 aa, Homo sapiens
LPISR

SEQ ID NO: 3560 - protein, 10 aa, Homo sapiens
LPKPVQDLIK

SEQ ID NO: 3561 - protein, 11 aa, Homo sapiens
LPLEYSYGEYR

SEQ ID NO: 3562 - protein, 9 aa, Homo sapiens
LPLIFHLGR

SEQ ID NO: 3563 - protein, 5 aa, Homo sapiens
LPLPR

SEQ ID NO: 3564 - protein, 5 aa, Homo sapiens
LPLSR

SEQ ID NO: 3565 - protein, 6 aa, Homo sapiens
LPMSVR

SEQ ID NO: 3566 - protein, 11 aa, Homo sapiens
LPNLSSLTLSR

SEQ ID NO: 3567 - protein, 9 aa, Homo sapiens
LPNNVLQEK

SEQ ID NO: 3568 - protein, 5 aa, Homo sapiens
LPPIR

SEQ ID NO: 3569 - protein, 5 aa, Homo sapiens
LPPLR

SEQ ID NO: 3570 - protein, 6 aa, Homo sapiens
LPPLRK

SEQ ID NO: 3571 - protein, 11 aa, Homo sapiens
LPPNVVEESAR

SEQ ID NO: 3572 - protein, 9 aa, Homo sapiens
LPPTDAYYK

SEQ ID NO: 3573 - protein, 21 aa, Homo sapiens
LPPTTTCQQQKEELLPAQDIK

SEQ ID NO: 3574 - protein, 16 aa, Homo sapiens
LPQQANDYLNSFNWER

SEQ ID NO: 3575 - protein, 6 aa, Homo sapiens
LPRLPK

SEQ ID NO: 3576 - protein, 24 aa, Homo sapiens
LPSEGPRPAHVVVGDVLQAADVDK

SEQ ID NO: 3577 - protein, 10 aa, Homo sapiens
LPSFLANVHK

SEQ ID NO: 3578 - protein, 18 aa, Homo sapiens
LPSGLPVSLLTLYLDNNK

SEQ ID NO: 3579 - protein, 11 aa, Homo sapiens
LPSGSDHVMLK

SEQ ID NO: 3580 - protein, 10 aa, Homo sapiens
LPTDSELAPR

SEQ ID NO: 3581 - protein, 14 aa, Homo sapiens
LPTGINPLTLHIMR

SEQ ID NO: 3582 - protein, 7 aa, Homo sapiens
LPVAPLR

SEQ ID NO: 3583 - protein, 8 aa, Homo sapiens
LPVAPLRK

SEQ ID NO: 3584 - protein, 5 aa, Homo sapiens
LPVKK

SEQ ID NO: 3585 - protein, 7 aa, Homo sapiens
LPVPAVK

SEQ ID NO: 3586 - protein, 9 aa, Homo sapiens
LPVSLSEGR

SEQ ID NO: 3587 - protein, 11 aa, Homo sapiens
LPVVLANGQIR

SEQ ID NO: 3588 - protein, 7 aa, Homo sapiens
LPYQCPK

SEQ ID NO: 3589 - protein, 7 aa, Homo sapiens
LPYSVVR

SEQ ID NO: 3590 - protein, 12 aa, Homo sapiens
LPYTIITTPPLK

SEQ ID NO: 3591 - protein, 19 aa, Homo sapiens
LPYTIITTPPLKDFSLWEK

SEQ ID NO: 3592 - protein, 9 aa, Homo sapiens
LQAEAFQAR

SEQ ID NO: 3593 - protein, 10 aa, Homo sapiens
LQAILGVPWK

SEQ ID NO: 3594 - protein, 12 aa, Homo sapiens
LQAILGVPWKDK

SEQ ID NO: 3595 - protein, 10 aa, Homo sapiens
LQAVTDDHIR

SEQ ID NO: 3596 - protein, 8 aa, Homo sapiens
LQDAEIAR

SEQ ID NO: 3597 - protein, 6 aa, Homo sapiens
LQDEVK

SEQ ID NO: 3598 - protein, 14 aa, Homo sapiens
LQDFSDQLSDYYEK

SEQ ID NO: 3599 - protein, 7 aa, Homo sapiens
LQDNELR

SEQ ID NO: 3600 - protein, 16 aa, Homo sapiens
LQDRGPDVLTATVSGK

SEQ ID NO: 3601 - protein, 5 aa, Homo sapiens
LQDVK

SEQ ID NO: 3602 - protein, 11 aa, Homo sapiens
LQEEMALQQEK

SEQ ID NO: 3603 - protein, 21 aa, Homo sapiens
LQEGYDHSYYFIATFITDHIR

SEQ ID NO: 3604 - protein, 26 aa, Homo sapiens
LQELHLSSNGLESLSPEFLRPVPQLR

SEQ ID NO: 3605 - protein, 27 aa, Homo sapiens
LQETSNWLLSQQQADGSFQDLSPVIHR

SEQ ID NO: 3606 - protein, 9 aa, Homo sapiens
LQGEIAHVK

SEQ ID NO: 3607 - protein, 9 aa, Homo sapiens
LQGLIPGAR

SEQ ID NO: 3608 - protein, 6 aa, Homo sapiens
LQGQGK

SEQ ID NO: 3609 - protein, 10 aa, Homo sapiens
LQGTLPVEAR

SEQ ID NO: 3610 - protein, 9 aa, Homo sapiens
LQGVERIMK

SEQ ID NO: 3611 - protein, 15 aa, Homo sapiens
LQHLENELTHDIITK

SEQ ID NO: 3612 - protein, 11 aa, Homo sapiens
LQHVDRPLSVR

SEQ ID NO: 3613 - protein, 16 aa, Homo sapiens
LQIAQLRPSSNYLALR

SEQ ID NO: 3614 - protein, 7 aa, Homo sapiens
LQILSLR

SEQ ID NO: 3615 - protein, 6 aa, Homo sapiens
LQIQEK

SEQ ID NO: 3616 - protein, 7 aa, Homo sapiens
LQLDRAR

SEQ ID NO: 3617 - protein, 15 aa, Homo sapiens
LQLKHLSLLTTLSNR

SEQ ID NO: 3618 - protein, 10 aa, Homo sapiens
LQLLLLNPLK

SEQ ID NO: 3619 - protein, 6 aa, Homo sapiens
LQLQEK

SEQ ID NO: 3620 - protein, 13 aa, Homo sapiens
LQNNENNISCVER

SEQ ID NO: 3621 - protein, 7 aa, Homo sapiens
LQPLDFK

SEQ ID NO: 3622 - protein, 14 aa, Homo sapiens
LQPLDFKENAEQSR

SEQ ID NO: 3623 - protein, 5 aa, Homo sapiens
LQPLK

SEQ ID NO: 3624 - protein, 16 aa, Homo sapiens
LQQELDDLLVDLDHQR

SEQ ID NO: 3625 - protein, 11 aa, Homo sapiens
LQQENMEMGEK

SEQ ID NO: 3626 - protein, 6 aa, Homo sapiens
LQQLKR

SEQ ID NO: 3627 - protein, 19 aa, Homo sapiens
LQQVLHAGSGPCLPHLLSR

SEQ ID NO: 3628 - protein, 13 aa, Homo sapiens
LQSIGTENTEENR

SEQ ID NO: 3629 - protein, 14 aa, Homo sapiens
LQSIGTENTEENRR

SEQ ID NO: 3630 - protein, 12 aa, Homo sapiens
LQSLFDSPDFSK

SEQ ID NO: 3631 - protein, 8 aa, Homo sapiens
LQSLHLYR

SEQ ID NO: 3632 - protein, 18 aa, Homo sapiens
LQVELDNVTGLLSQSDSK

SEQ ID NO: 3633 - protein, 8 aa, Homo sapiens
LQVFQALR

SEQ ID NO: 3634 - protein, 6 aa, Homo sapiens
LQVIFK

SEQ ID NO: 3635 - protein, 6 aa, Homo sapiens
LQVLGK

SEQ ID NO: 3636 - protein, 16 aa, Homo sapiens
LQVLGKDLLLPQPDLR

SEQ ID NO: 3637 - protein, 7 aa, Homo sapiens
LQVLRVK

SEQ ID NO: 3638 - protein, 5 aa, Homo sapiens
LQYVK

SEQ ID NO: 3639 - protein, 8 aa, Homo sapiens
LREEIEGK

SEQ ID NO: 3640 - protein, 18 aa, Homo sapiens
LREQLGPVTQEFWDNLEK

SEQ ID NO: 3641 - protein, 7 aa, Homo sapiens
LRLEPGK

SEQ ID NO: 3642 - protein, 7 aa, Homo sapiens
LRLEPLK

SEQ ID NO: 3643 - protein, 13 aa, Homo sapiens
LRNGHVGISFVPK

SEQ ID NO: 3644 - protein, 8 aa, Homo sapiens
LRNQTDLK

SEQ ID NO: 3645 - protein, 6 aa, Homo sapiens
LRPLWK

SEQ ID NO: 3646 - protein, 14 aa, Homo sapiens
LRTEGDGVYTLNDK

SEQ ID NO: 3647 - protein, 15 aa, Homo sapiens
LRTEGDGVYTLNNEK

SEQ ID NO: 3648 - protein, 9 aa, Homo sapiens
LRVDPVNFK

SEQ ID NO: 3649 - protein, 9 aa, Homo sapiens
LSAGSAALR

SEQ ID NO: 3650 - protein, 19 aa, Homo sapiens
LSCAASGFTFDDYAMHWVR

SEQ ID NO: 3651 - protein, 13 aa, Homo sapiens
LSDLLAPISEQIK

SEQ ID NO: 3652 - protein, 6 aa, Homo sapiens
LSDLLK

SEQ ID NO: 3653 - protein, 10 aa, Homo sapiens
LSEAEFEVLK

SEQ ID NO: 3654 - protein, 9 aa, Homo sapiens
LSEDYGVLK

SEQ ID NO: 3655 - protein, 13 aa, Homo sapiens
LSEEPLQVLEHPR

SEQ ID NO: 3656 - protein, 16 aa, Homo sapiens
LSEGASYLDHTFPAEK

SEQ ID NO: 3657 - protein, 10 aa, Homo sapiens
LSEGFSIHTR

SEQ ID NO: 3658 - protein, 15 aa, Homo sapiens
LSEKHEGSFIQGAEK

SEQ ID NO: 3659 - protein, 14 aa, Homo sapiens
LSEYSHHFVSAFAR

SEQ ID NO: 3660 - protein, 5 aa, Homo sapiens
LSFFR

SEQ ID NO: 3661 - protein, 8 aa, Homo sapiens
LSFQEFLK

SEQ ID NO: 3662 - protein, 5 aa, Homo sapiens
LSFVK

SEQ ID NO: 3663 - protein, 11 aa, Homo sapiens
LSFVKVDSHFR

SEQ ID NO: 3664 - protein, 10 aa, Homo sapiens
LSFYYLIMAK

SEQ ID NO: 3665 - protein, 15 aa, Homo sapiens
LSFYYLIMAKGGIVR

SEQ ID NO: 3666 - protein, 13 aa, Homo sapiens
LSGALHVYSLGSD

SEQ ID NO: 3667 - protein, 6 aa, Homo sapiens
LSGLPK

SEQ ID NO: 3668 - protein, 13 aa, Homo sapiens
LSGNVLSYTFQVK

SEQ ID NO: 3669 - protein, 14 aa, Homo sapiens
LSGSHSQGVAYPVR

SEQ ID NO: 3670 - protein, 12 aa, Homo sapiens
LSHNAIASLRPR

SEQ ID NO: 3671 - protein, 7 aa, Homo sapiens
LSICFMK

SEQ ID NO: 3672 - protein, 5 aa, Homo sapiens
LSIMK

SEQ ID NO: 3673 - protein, 17 aa, Homo sapiens
LSINTHPSQKPLSITVR

SEQ ID NO: 3674 - protein, 10 aa, Homo sapiens
LSITGTYDLK

SEQ ID NO: 3675 - protein, 6 aa, Homo sapiens
LSLASK

SEQ ID NO: 3676 - protein, 12 aa, Homo sapiens
LSLEIEQLELQR

SEQ ID NO: 3677 - protein, 17 aa, Homo sapiens
LSLESLTSYFSIESSTK

SEQ ID NO: 3678 - protein, 21 aa, Homo sapiens
LSLESLTSYFSIESSTKGDVK

SEQ ID NO: 3679 - protein, 6 aa, Homo sapiens
LSLGPR

SEQ ID NO: 3680 - protein, 8 aa, Homo sapiens
LSLHGDIR

SEQ ID NO: 3681 - protein, 16 aa, Homo sapiens
LSLLEELSLAENQLLK

SEQ ID NO: 3682 - protein, 5 aa, Homo sapiens
LSLMK

SEQ ID NO: 3683 - protein, 7 aa, Homo sapiens
LSLPDFK

SEQ ID NO: 3684 - protein, 9 aa, Homo sapiens
LSMDGSPTR

SEQ ID NO: 3685 - protein, 10 aa, Homo sapiens
LSMDIDVSYK

SEQ ID NO: 3686 - protein, 12 aa, Homo sapiens
LSMDIDVSYKHK

SEQ ID NO: 3687 - protein, 6 aa, Homo sapiens
LSMEIK

SEQ ID NO: 3688 - protein, 7 aa, Homo sapiens
LSNAAHK

SEQ ID NO: 3689 - protein, 13 aa, Homo sapiens
LSNDMMGSYAEMK

SEQ ID NO: 3690 - protein, 11 aa, Homo sapiens
LSNENHGIAQR

SEQ ID NO: 3691 - protein, 10 aa, Homo sapiens
LSNHISSLFR

SEQ ID NO: 3692 - protein, 6 aa, Homo sapiens
LSNLIK

SEQ ID NO: 3693 - protein, 16 aa, Homo sapiens
LSNNALSGLPQGVFGK

SEQ ID NO: 3694 - protein, 13 aa, Homo sapiens
LSNRPAFMPSEGR

SEQ ID NO: 3695 - protein, 9 aa, Homo sapiens
LSPEDYTLK

SEQ ID NO: 3696 - protein, 9 aa, Homo sapiens
LSPEELLLR

SEQ ID NO: 3697 - protein, 6 aa, Homo sapiens
LSPEGK

SEQ ID NO: 3698 - protein, 7 aa, Homo sapiens
LSPHAFK

SEQ ID NO: 3699 - protein, 11 aa, Homo sapiens
LSPIYNLVPVK

SEQ ID NO: 3700 - protein, 9 aa, Homo sapiens
LSPLGEEMR

SEQ ID NO: 3701 - protein, 11 aa, Homo sapiens
LSPLGEEMRDR

SEQ ID NO: 3702 - protein, 8 aa, Homo sapiens
LSPVYAGK

SEQ ID NO: 3703 - protein, 11 aa, Homo sapiens
LSQEDPDYGIR

SEQ ID NO: 3704 - protein, 13 aa, Homo sapiens
LSSGLVTAALYGR

SEQ ID NO: 3705 - protein, 9 aa, Homo sapiens
LSSNGSPTK

SEQ ID NO: 3706 - protein, 10 aa, Homo sapiens
LSSPAVITDK

SEQ ID NO: 3707 - protein, 9 aa, Homo sapiens
LSSWVLLMK

SEQ ID NO: 3708 - protein, 6 aa, Homo sapiens
LSVDGR

SEQ ID NO: 3709 - protein, 5 aa, Homo sapiens
LSVDK

SEQ ID NO: 3710 - protein, 8 aa, Homo sapiens
LSVGTLKK

SEQ ID NO: 3711 - protein, 5 aa, Homo sapiens
LSVIR

SEQ ID NO: 3712 - protein, 5 aa, Homo sapiens
LSVLR

SEQ ID NO: 3713 - protein, 9 aa, Homo sapiens
LSYEGEVTK

SEQ ID NO: 3714 - protein, 10 aa, Homo sapiens
LSYTCEGGFR

SEQ ID NO: 3715 - protein, 6 aa, Homo sapiens
LTALTK

SEQ ID NO: 3716 - protein, 7 aa, Homo sapiens
LTALTKK

SEQ ID NO: 3717 - protein, 5 aa, Homo sapiens
LTDVK

SEQ ID NO: 3718 - protein, 12 aa, Homo sapiens
LTEVLLGHNSWR

SEQ ID NO: 3719 - protein, 11 aa, Homo sapiens
LTGISDPVTVK

SEQ ID NO: 3720 - protein, 16 aa, Homo sapiens
LTGSSGFVTDGPGNYK

SEQ ID NO: 3721 - protein, 5 aa, Homo sapiens
LTIFK

SEQ ID NO: 3722 - protein, 9 aa, Homo sapiens
LTIFKTELR

SEQ ID NO: 3723 - protein, 15 aa, Homo sapiens
LTIGEGQQHHLGGAK

SEQ ID NO: 3724 - protein, 5 aa, Homo sapiens
LTIPR

SEQ ID NO: 3725 - protein, 10 aa, Homo sapiens
LTISEQNIQR

SEQ ID NO: 3726 - protein, 5 aa, Homo sapiens
LTISK

SEQ ID NO: 3727 - protein, 8 aa, Homo sapiens
LTLDIQNK

SEQ ID NO: 3728 - protein, 9 aa, Homo sapiens
LTLDIQNKK

SEQ ID NO: 3729 - protein, 9 aa, Homo sapiens
LTLDKLDVK

SEQ ID NO: 3730 - protein, 11 aa, Homo sapiens
LTLKSLEVELK

SEQ ID NO: 3731 - protein, 12 aa, Homo sapiens
LTLLAPLNSVFK

SEQ ID NO: 3732 - protein, 37 aa, Homo sapiens
LTLNFNMLEALPEGLFQHLAALESLHLQGNQLQALPR

SEQ ID NO: 3733 - protein, 5 aa, Homo sapiens
LTLPR

SEQ ID NO: 3734 - protein, 5 aa, Homo sapiens
LTLSK

SEQ ID NO: 3735 - protein, 5 aa, Homo sapiens
LTLSR

SEQ ID NO: 3736 - protein, 5 aa, Homo sapiens
LTLTK

SEQ ID NO: 3737 - protein, 10 aa, Homo sapiens
LTLTPWVGLR

SEQ ID NO: 3738 - protein, 11 aa, Homo sapiens
LTLTPWVGLRK

SEQ ID NO: 3739 - protein, 22 aa, Homo sapiens
LTLYDIAHTPGVAADLSHIETK

SEQ ID NO: 3740 - protein, 7 aa, Homo sapiens
LTNRSPR

SEQ ID NO: 3741 - protein, 9 aa, Homo sapiens
LTPAGLAIK

SEQ ID NO: 3742 - protein, 8 aa, Homo sapiens
LTPEEIER

SEQ ID NO: 3743 - protein, 8 aa, Homo sapiens
LTPEELER

SEQ ID NO: 3744 - protein, 5 aa, Homo sapiens
LTPLR

SEQ ID NO: 3745 - protein, 9 aa, Homo sapiens
LTPLYELVK

SEQ ID NO: 3746 - protein, 9 aa, Homo sapiens
LTPYADEFK

SEQ ID NO: 3747 - protein, 11 aa, Homo sapiens
LTPYADEFKVK

SEQ ID NO: 3748 - protein, 16 aa, Homo sapiens
LTQLGTFEDHFLSLQR

SEQ ID NO: 3749 - protein, 8 aa, Homo sapiens
LTQLNLDR

SEQ ID NO: 3750 - protein, 10 aa, Homo sapiens
LTSLPLGALR

SEQ ID NO: 3751 - protein, 7 aa, Homo sapiens
LTSLSDR

SEQ ID NO: 3752 - protein, 30 aa, Homo sapiens
LTSLSDRYVSHFETEGPHVLLYFDSVPTSR

SEQ ID NO: 3753 - protein, 25 aa, Homo sapiens
LTVAAPPSGGPGFLSIERPDSRPPR

SEQ ID NO: 3754 - protein, 5 aa, Homo sapiens
LTVDK

SEQ ID NO: 3755 - protein, 7 aa, Homo sapiens
LTVGLTR

SEQ ID NO: 3756 - protein, 17 aa, Homo sapiens
LTVLPPELGNLDLTGQK

SEQ ID NO: 3757 - protein, 5 aa, Homo sapiens
LTVLR

SEQ ID NO: 3758 - protein, 8 aa, Homo sapiens
LTVSIEAR

SEQ ID NO: 3759 - protein, 8 aa, Homo sapiens
LTWASHEK

SEQ ID NO: 3760 - protein, 27 aa, Homo sapiens
LTYAYFAGGDAGDAFDGFDFGDDPSDK

SEQ ID NO: 3761 - protein, 12 aa, Homo sapiens
LTYNHGGITGSR

SEQ ID NO: 3762 - protein, 11 aa, Homo sapiens
LVAAKCTLAAR

SEQ ID NO: 3763 - protein, 6 aa, Homo sapiens
LVALKK

SEQ ID NO: 3764 - protein, 14 aa, Homo sapiens
LVAYYTLIGASGQR

SEQ ID NO: 3765 - protein, 10 aa, Homo sapiens
LVDEDMNSFK

SEQ ID NO: 3766 - protein, 14 aa, Homo sapiens
LVDEDMNSFKADVK

SEQ ID NO: 3767 - protein, 5 aa, Homo sapiens
LVDGK

SEQ ID NO: 3768 - protein, 5 aa, Homo sapiens
LVDIK

SEQ ID NO: 3769 - protein, 10 aa, Homo sapiens
LVDKFLEDVK

SEQ ID NO: 3770 - protein, 5 aa, Homo sapiens
LVDLK

SEQ ID NO: 3771 - protein, 6 aa, Homo sapiens
LVDQDK

SEQ ID NO: 3772 - protein, 9 aa, Homo sapiens
LVELAHQYK

SEQ ID NO: 3773 - protein, 6 aa, Homo sapiens
LVEMYK

SEQ ID NO: 3774 - protein, 21 aa, Homo sapiens
LVFNRPFLMFIVDNNILFLGK

SEQ ID NO: 3775 - protein, 20 aa, Homo sapiens
LVFQQFDLEPSEGCFYDYVK

SEQ ID NO: 3776 - protein, 8 aa, Homo sapiens
LVGDVIQR

SEQ ID NO: 3777 - protein, 5 aa, Homo sapiens
LVGGK

SEQ ID NO: 3778 - protein, 7 aa, Homo sapiens
LVGGLHR

SEQ ID NO: 3779 - protein, 17 aa, Homo sapiens
LVGGPMDASVEEEGVRR

SEQ ID NO: 3780 - protein, 9 aa, Homo sapiens
LVHANFGTK

SEQ ID NO: 3781 - protein, 12 aa, Homo sapiens
LVHCPIETQVLR

SEQ ID NO: 3782 - protein, 7 aa, Homo sapiens
LVHILVR

SEQ ID NO: 3783 - protein, 13 aa, Homo sapiens
LVHVEEPHTETVR

SEQ ID NO: 3784 - protein, 14 aa, Homo sapiens
LVHVEEPHTETVRK

SEQ ID NO: 3785 - protein, 9 aa, Homo sapiens
LVIAGHLLR

SEQ ID NO: 3786 - protein, 14 aa, Homo sapiens
LVIIESDLERAEER

SEQ ID NO: 3787 - protein, 9 aa, Homo sapiens
LVIITAGAR

SEQ ID NO: 3788 - protein, 10 aa, Homo sapiens
LVILEGELER

SEQ ID NO: 3789 - protein, 14 aa, Homo sapiens
LVILEGELERAEER

SEQ ID NO: 3790 - protein, 6 aa, Homo sapiens
LVKPQK

SEQ ID NO: 3791 - protein, 5 aa, Homo sapiens
LVLIR

SEQ ID NO: 3792 - protein, 12 aa, Homo sapiens
LVLLNAIYLSAK

SEQ ID NO: 3793 - protein, 5 aa, Homo sapiens
LVLLR

SEQ ID NO: 3794 - protein, 22 aa, Homo sapiens
LVLWTAEEQGGVGAFQYYQLHK

SEQ ID NO: 3795 - protein, 10 aa, Homo sapiens
LVNEVTEFAK

SEQ ID NO: 3796 - protein, 12 aa, Homo sapiens
LVNGQSHISLSK

SEQ ID NO: 3797 - protein, 21 aa, Homo sapiens
LVNGQSHISLSKAEFQDALEK

SEQ ID NO: 3798 - protein, 5 aa, Homo sapiens
LVNLK

SEQ ID NO: 3799 - protein, 14 aa, Homo sapiens
LVNMLDAVQENQHK

SEQ ID NO: 3800 - protein, 12 aa, Homo sapiens
LVNVVLGAHNVR

SEQ ID NO: 3801 - protein, 11 aa, Homo sapiens
LVPFATELHER

SEQ ID NO: 3802 - protein, 13 aa, Homo sapiens
LVPGWTKPITIGR

SEQ ID NO: 3803 - protein, 8 aa, Homo sapiens
LVPNPDQK

SEQ ID NO: 3804 - protein, 34 aa, Homo sapiens
LVQAFQYTDEHGEVCPAGWKPGSDTIKPNVDDSK

SEQ ID NO: 3805 - protein, 11 aa, Homo sapiens
LVQGFMPHFFR

SEQ ID NO: 3806 - protein, 22 aa, Homo sapiens
LVRPEVDVMCTAFHDNEETFLK

SEQ ID NO: 3807 - protein, 23 aa, Homo sapiens
LVRPEVDVMCTAFHDNEETFLKK

SEQ ID NO: 3808 - protein, 6 aa, Homo sapiens
LVSANR

SEQ ID NO: 3809 - protein, 7 aa, Homo sapiens
LVSAQQK

SEQ ID NO: 3810 - protein, 13 aa, Homo sapiens
LVSGWVKPIIIGR

SEQ ID NO: 3811 - protein, 7 aa, Homo sapiens
LVSQKPK

SEQ ID NO: 3812 - protein, 7 aa, Homo sapiens
LVTDLTK

SEQ ID NO: 3813 - protein, 6 aa, Homo sapiens
LVTELR

SEQ ID NO: 3814 - protein, 5 aa, Homo sapiens
LVTSK

SEQ ID NO: 3815 - protein, 8 aa, Homo sapiens
LVTSKGDK

SEQ ID NO: 3816 - protein, 6 aa, Homo sapiens
LVVEEK

SEQ ID NO: 3817 - protein, 8 aa, Homo sapiens
LVVLPFPK

SEQ ID NO: 3818 - protein, 9 aa, Homo sapiens
LVWEEAMSR

SEQ ID NO: 3819 - protein, 8 aa, Homo sapiens
LVYAIFLK

SEQ ID NO: 3820 - protein, 22 aa, Homo sapiens
LVYHLGLPFSFLTFPYVEEAIK

SEQ ID NO: 3821 - protein, 13 aa, Homo sapiens
LWAYLTIEQLLEK

SEQ ID NO: 3822 - protein, 14 aa, Homo sapiens
LWAYLTINQLLAER

SEQ ID NO: 3823 - protein, 13 aa, Homo sapiens
LWAYLTIQELLAK

SEQ ID NO: 3824 - protein, 14 aa, Homo sapiens
LWAYLTIQELLAKR

SEQ ID NO: 3825 - protein, 26 aa, Homo sapiens
LWAYLTIQQLLEQTVSASDADQQALR

SEQ ID NO: 3826 - protein, 5 aa, Homo sapiens
LWLQR

SEQ ID NO: 3827 - protein, 24 aa, Homo sapiens
LWVMPNHQVLLGPEEDQDHIYHPQ

SEQ ID NO: 3828 - protein, 7 aa, Homo sapiens
LWWLDLK

SEQ ID NO: 3829 - protein, 8 aa, Homo sapiens
LYAYHLSR

SEQ ID NO: 3830 - protein, 18 aa, Homo sapiens
LYGSEAFATDFQDSAAAK

SEQ ID NO: 3831 - protein, 19 aa, Homo sapiens
LYGSEAFATDFQDSAAAKK

SEQ ID NO: 3832 - protein, 9 aa, Homo sapiens
LYHAFSAMK

SEQ ID NO: 3833 - protein, 10 aa, Homo sapiens
LYHAFSAMKK

SEQ ID NO: 3834 - protein, 18 aa, Homo sapiens
LYHSEAFTVNFGDTEEAK

SEQ ID NO: 3835 - protein, 19 aa, Homo sapiens
LYHSEAFTVNFGDTEEAKK

SEQ ID NO: 3836 - protein, 28 aa, Homo sapiens
LYLKHQMDLVATLSQLGLQELFQAPDLR

SEQ ID NO: 3837 - protein, 10 aa, Homo sapiens
LYLQMSTHGK

SEQ ID NO: 3838 - protein, 15 aa, Homo sapiens
LYLVQGTQVYVFLTK

SEQ ID NO: 3839 - protein, 26 aa, Homo sapiens
LYLVQGTQVYVFLTKGGYTLVSGYPK

SEQ ID NO: 3840 - protein, 16 aa, Homo sapiens
LYPIANGNNQSPVDIK

SEQ ID NO: 3841 - protein, 10 aa, Homo sapiens
LYQHSQQPGK

SEQ ID NO: 3842 - protein, 14 aa, Homo sapiens
LYSILGTTLKDEGK

SEQ ID NO: 3843 - protein, 6 aa, Homo sapiens
LYSILK

SEQ ID NO: 3844 - protein, 6 aa, Homo sapiens
LYSLLK

SEQ ID NO: 3845 - protein, 9 aa, Homo sapiens
LYSVHRPVK

SEQ ID NO: 3846 - protein, 9 aa, Homo sapiens
LYSVSYLLK

SEQ ID NO: 3847 - protein, 5 aa, Homo sapiens
LYVEK

SEQ ID NO: 3848 - protein, 8 aa, Homo sapiens
LYYGDDEK

SEQ ID NO: 3849 - protein, 11 aa, Homo sapiens
LYYGDDEKYFR

SEQ ID NO: 3850 - protein, 5 aa, Homo sapiens
MAAIK

SEQ ID NO: 3851 - protein, 5 aa, Homo sapiens
MAALK

SEQ ID NO: 3852 - protein, 18 aa, Homo sapiens
MADEAGSEADHEGTHSTK

SEQ ID NO: 3853 - protein, 12 aa, Homo sapiens
MAESGYDIALLK

SEQ ID NO: 3854 - protein, 5 aa, Homo sapiens
MAITK

SEQ ID NO: 3855 - protein, 7 aa, Homo sapiens
MALEVYK

SEQ ID NO: 3856 - protein, 19 aa, Homo sapiens
MALEVYKLSLEIEQLELQR

SEQ ID NO: 3857 - protein, 5 aa, Homo sapiens
MALTK

SEQ ID NO: 3858 - protein, 8 aa, Homo sapiens
MAPSFTAR

SEQ ID NO: 3859 - protein, 13 aa, Homo sapiens
MATNAAAQNAIKK

SEQ ID NO: 3860 - protein, 9 aa, Homo sapiens
MATTMIQSK

SEQ ID NO: 3861 - protein, 15 aa, Homo sapiens
MAVGFMLAHPYGFTR

SEQ ID NO: 3862 - protein, 17 aa, Homo sapiens
MCPQLQQYEMHGPEGLR

SEQ ID NO: 3863 - protein, 15 aa, Homo sapiens
MDELRPLIPVLEEYK

SEQ ID NO: 3864 - protein, 19 aa, Homo sapiens
MDELRPLIPVLEEYKADAK

SEQ ID NO: 3865 - protein, 8 aa, Homo sapiens
MDILSYMR

SEQ ID NO: 3866 - protein, 7 aa, Homo sapiens
MDMTFSK

SEQ ID NO: 3867 - protein, 8 aa, Homo sapiens
MDQLLLEK

SEQ ID NO: 3868 - protein, 17 aa, Homo sapiens
MDVFSQNMFCAGHPSLK

SEQ ID NO: 3869 - protein, 18 aa, Homo sapiens
MDYKGDATVFFILPNQGK

SEQ ID NO: 3870 - protein, 5 aa, Homo sapiens
MDYPK

SEQ ID NO: 3871 - protein, 7 aa, Homo sapiens
MEEMGSR

SEQ ID NO: 3872 - protein, 14 aa, Homo sapiens
MEEVEAMLLPETLK

SEQ ID NO: 3873 - protein, 15 aa, Homo sapiens
MEEVEAMLLPETLKR

SEQ ID NO: 3874 - protein, 8 aa, Homo sapiens
MEILHPGK

SEQ ID NO: 3875 - protein, 9 aa, Homo sapiens
MEIQEIQLK

SEQ ID NO: 3876 - protein, 13 aa, Homo sapiens
MELERPGGNEITR

SEQ ID NO: 3877 - protein, 29 aa, Homo sapiens
MELERPGGNEITRGGSTSYGTGSETESPR

SEQ ID NO: 3878 - protein, 9 aa, Homo sapiens
MELQEIQLK

SEQ ID NO: 3879 - protein, 7 aa, Homo sapiens
MEPFHFK

SEQ ID NO: 3880 - protein, 12 aa, Homo sapiens
MEPFHFKNSVIK

SEQ ID NO: 3881 - protein, 9 aa, Homo sapiens
MESLGITSR

SEQ ID NO: 3882 - protein, 6 aa, Homo sapiens
MFEELK

SEQ ID NO: 3883 - protein, 42 aa, Homo sapiens
MFGNLQGLTMHVGDEVNWYLMGMGNEIDLHTVHFHGHSFQYK

SEQ ID NO: 3884 - protein, 6 aa, Homo sapiens
MFLHVK

SEQ ID NO: 3885 - protein, 13 aa, Homo sapiens
MFLHVKGEIHLGR

SEQ ID NO: 3886 - protein, 9 aa, Homo sapiens
MFLSFPTTK

SEQ ID NO: 3887 - protein, 8 aa, Homo sapiens
MFQEIVHK

SEQ ID NO: 3888 - protein, 24 aa, Homo sapiens
MFQNFPTELLLSLAVEPLTANFHK

SEQ ID NO: 3889 - protein, 11 aa, Homo sapiens
MFTTAPDQVDK

SEQ ID NO: 3890 - protein, 21 aa, Homo sapiens
MFTTAPDQVDKEDEDFQESNK

SEQ ID NO: 3891 - protein, 8 aa, Homo sapiens
MFYIKPIK

SEQ ID NO: 3892 - protein, 21 aa, Homo sapiens
MGDHLALEDYLTTDLVETWLR

SEQ ID NO: 3893 - protein, 10 aa, Homo sapiens
MGDHLTNLHR

SEQ ID NO: 3894 - protein, 8 aa, Homo sapiens
MGFVDNKR

SEQ ID NO: 3895 - protein, 12 aa, Homo sapiens
MGHAGAIIAGGK

SEQ ID NO: 3896 - protein, 23 aa, Homo sapiens
MGIQHAYSENADFSGLTEDNGLK

SEQ ID NO: 3897 - protein, 9 aa, Homo sapiens
MGLAFESTK

SEQ ID NO: 3898 - protein, 15 aa, Homo sapiens
MGNFPWQVFTNIHGR

SEQ ID NO: 3899 - protein, 18 aa, Homo sapiens
MGNLHTWDGPLPPSWHIK

SEQ ID NO: 3900 - protein, 14 aa, Homo sapiens
MGPTELLIEMEDWK

SEQ ID NO: 3901 - protein, 17 aa, Homo sapiens
MGPTELLIEMEDWKGDK

SEQ ID NO: 3902 - protein, 13 aa, Homo sapiens
MGPVTSAHVGTYR

SEQ ID NO: 3903 - protein, 7 aa, Homo sapiens
MHAINGR

SEQ ID NO: 3904 - protein, 14 aa, Homo sapiens
MHAPPINMESVHMK

SEQ ID NO: 3905 - protein, 21 aa, Homo sapiens
MHEGDEGPGHHHKPGLGEGTP

SEQ ID NO: 3906 - protein, 11 aa, Homo sapiens
MHLYGLHEGQR

SEQ ID NO: 3907 - protein, 19 aa, Homo sapiens
MHSMNGFMYGNQPGLTMCK

SEQ ID NO: 3908 - protein, 9 aa, Homo sapiens
MHVLHCQGR

SEQ ID NO: 3909 - protein, 7 aa, Homo sapiens
MIEQMLK

SEQ ID NO: 3910 - protein, 12 aa, Homo sapiens
MIKPFFHSLSEK

SEQ ID NO: 3911 - protein, 8 aa, Homo sapiens
MILELFSK

SEQ ID NO: 3912 - protein, 7 aa, Homo sapiens
MIYASSK

SEQ ID NO: 3913 - protein, 11 aa, Homo sapiens
MKDTDSEEEIR

SEQ ID NO: 3914 - protein, 9 aa, Homo sapiens
MKFACYYPR

SEQ ID NO: 3915 - protein, 15 aa, Homo sapiens
MKGLIDEVNQDFTNR

SEQ ID NO: 3916 - protein, 13 aa, Homo sapiens
MKPVPDLVPGNFK

SEQ ID NO: 3917 - protein, 18 aa, Homo sapiens
MKPVPDLVPGNFKSQLQK

SEQ ID NO: 3918 - protein, 9 aa, Homo sapiens
MKQTVEAMK

SEQ ID NO: 3919 - protein, 12 aa, Homo sapiens
MKYWGVASFLQK

SEQ ID NO: 3920 - protein, 16 aa, Homo sapiens
MLDAEDIVGTARPDEK

SEQ ID NO: 3921 - protein, 7 aa, Homo sapiens
MLEEIMK

SEQ ID NO: 3922 - protein, 20 aa, Homo sapiens
MLEEIMKYEASILTHDSSIR

SEQ ID NO: 3923 - protein, 9 aa, Homo sapiens
MLEVPYVDR

SEQ ID NO: 3924 - protein, 5 aa, Homo sapiens
MLFDK

SEQ ID NO: 3925 - protein, 16 aa, Homo sapiens
MLFDKNGNMAGISDQR

SEQ ID NO: 3926 - protein, 13 aa, Homo sapiens
MLHACTSEGSAHR

SEQ ID NO: 3927 - protein, 15 aa, Homo sapiens
MLITILGTVKPNANR

SEQ ID NO: 3928 - protein, 12 aa, Homo sapiens
MLQITNTGFEMK

SEQ ID NO: 3929 - protein, 7 aa, Homo sapiens
MLTELEK

SEQ ID NO: 3930 - protein, 14 aa, Homo sapiens
MLTPEHVFIHPGWK

SEQ ID NO: 3931 - protein, 11 aa, Homo sapiens
MMAVAADTLQR

SEQ ID NO: 3932 - protein, 7 aa, Homo sapiens
MMPHFQK

SEQ ID NO: 3933 - protein, 12 aa, Homo sapiens
MNFKQELNGNTK

SEQ ID NO: 3934 - protein, 11 aa, Homo sapiens
MNFRPGVLSSR

SEQ ID NO: 3935 - protein, 19 aa, Homo sapiens
MNLASEPQEVLHIGSAHNR

SEQ ID NO: 3936 - protein, 7 aa, Homo sapiens
MNLSRLK

SEQ ID NO: 3937 - protein, 11 aa, Homo sapiens
MNLYGFHGGQR

SEQ ID NO: 3938 - protein, 8 aa, Homo sapiens
MNMTAYNK

SEQ ID NO: 3939 - protein, 10 aa, Homo sapiens
MNTVIAALSR

SEQ ID NO: 3940 - protein, 22 aa, Homo sapiens
MNVAPACLPERDWAESTLMTQK

SEQ ID NO: 3941 - protein, 7 aa, Homo sapiens
MPEINIK

SEQ ID NO: 3942 - protein, 26 aa, Homo sapiens
MPITYDNGFLFIHTDKPVYTPDQSVK

SEQ ID NO: 3943 - protein, 11 aa, Homo sapiens
MPPSHQLDHSK

SEQ ID NO: 3944 - protein, 7 aa, Homo sapiens
MQHLIAR

SEQ ID NO: 3945 - protein, 13 aa, Homo sapiens
MQILEGLGLNLQK

SEQ ID NO: 3946 - protein, 11 aa, Homo sapiens
MQQVENGLSEK

SEQ ID NO: 3947 - protein, 9 aa, Homo sapiens
MRDVVLFEK

SEQ ID NO: 3948 - protein, 15 aa, Homo sapiens
MREIEEVLTPEMLMR

SEQ ID NO: 3949 - protein, 11 aa, Homo sapiens
MREWFSETFQK

SEQ ID NO: 3950 - protein, 6 aa, Homo sapiens
MRIHLK

SEQ ID NO: 3951 - protein, 12 aa, Homo sapiens
MRMTSSPVTGGK

SEQ ID NO: 3952 - protein, 19 aa, Homo sapiens
MRPSTDTITVMVENSHGLR

SEQ ID NO: 3953 - protein, 10 aa, Homo sapiens
MSAEINEIIR

SEQ ID NO: 3954 - protein, 19 aa, Homo sapiens
MSAQTHGLLGQFFQPFDFK

SEQ ID NO: 3955 - protein, 21 aa, Homo sapiens
MSAVEGICTSESPVIDHQGTK

SEQ ID NO: 3956 - protein, 24 aa, Homo sapiens
MSENIPNEVYALGAFDGLHTVEGR

SEQ ID NO: 3957 - protein, 7 aa, Homo sapiens
MSESGFK

SEQ ID NO: 3958 - protein, 5 aa, Homo sapiens
MSGMK

SEQ ID NO: 3959 - protein, 7 aa, Homo sapiens
MSLNGQR

SEQ ID NO: 3960 - protein, 31 aa, Homo sapiens
MSLSSFSVNRPFLFFIFEDTTGLPLFVGSVR

SEQ ID NO: 3961 - protein, 14 aa, Homo sapiens
MSSINADFAFNLYR

SEQ ID NO: 3962 - protein, 8 aa, Homo sapiens
MSSSVEQK

SEQ ID NO: 3963 - protein, 13 aa, Homo sapiens
MTAQPGRPFGSTK

SEQ ID NO: 3964 - protein, 10 aa, Homo sapiens
MTASFHQTYR

SEQ ID NO: 3965 - protein, 12 aa, Homo sapiens
MTGLVDEAIDTK

SEQ ID NO: 3966 - protein, 7 aa, Homo sapiens
MTLDDFR

SEQ ID NO: 3967 - protein, 5 aa, Homo sapiens
MTMDK

SEQ ID NO: 3968 - protein, 14 aa, Homo sapiens
MTSNFPVDLSDYPK

SEQ ID NO: 3969 - protein, 8 aa, Homo sapiens
MVANDIAK

SEQ ID NO: 3970 - protein, 16 aa, Homo sapiens
MVETTAYALLTSLNLK

SEQ ID NO: 3971 - protein, 18 aa, Homo sapiens
MVGGIAQIIAAQEEMLRK

SEQ ID NO: 3972 - protein, 15 aa, Homo sapiens
MVLLEQLFLDHNALR

SEQ ID NO: 3973 - protein, 10 aa, Homo sapiens
MVNHFIAEFK

SEQ ID NO: 3974 - protein, 5 aa, Homo sapiens
MVQGK

SEQ ID NO: 3975 - protein, 13 aa, Homo sapiens
MVSGFIPLKPTVK

SEQ ID NO: 3976 - protein, 7 aa, Homo sapiens
MVTSESK

SEQ ID NO: 3977 - protein, 11 aa, Homo sapiens
MVVESAYEVIK

SEQ ID NO: 3978 - protein, 24 aa, Homo sapiens
MVVNEGSDGGQSVYHVHLHVLGGR

SEQ ID NO: 3979 - protein, 16 aa, Homo sapiens
MVVVAAAPNPADGTPK

SEQ ID NO: 3980 - protein, 8 aa, Homo sapiens
MYEQEWVR

SEQ ID NO: 3981 - protein, 15 aa, Homo sapiens
MYFDAVQAIETHLIR

SEQ ID NO: 3982 - protein, 5 aa, Homo sapiens
MYLEK

SEQ ID NO: 3983 - protein, 12 aa, Homo sapiens
MYLGYEYVTAIR

SEQ ID NO: 3984 - protein, 5 aa, Homo sapiens
MYLQK

SEQ ID NO: 3985 - protein, 13 aa, Homo sapiens
MYVAVWTPYGVLR

SEQ ID NO: 3986 - protein, 10 aa, Homo sapiens
MYYSAVDPTK

SEQ ID NO: 3987 - protein, 13 aa, Homo sapiens
NAAENGAIQNLIK

SEQ ID NO: 3988 - protein, 24 aa, Homo sapiens
NAAENGAIQNLIKEEAFLGITDEK

SEQ ID NO: 3989 - protein, 19 aa, Homo sapiens
NADLQVLKPEPELVYEDLR

SEQ ID NO: 3990 - protein, 10 aa, Homo sapiens
NADYSYSVWK

SEQ ID NO: 3991 - protein, 24 aa, Homo sapiens
NADYSYSVWKGGSASTWLTAFALR

SEQ ID NO: 3992 - protein, 6 aa, Homo sapiens
NAEELK

SEQ ID NO: 3993 - protein, 13 aa, Homo sapiens
NAHGEEKENLTAR

SEQ ID NO: 3994 - protein, 6 aa, Homo sapiens
NAHLKK

SEQ ID NO: 3995 - protein, 16 aa, Homo sapiens
NAIHTFVQSGSHLAAR

SEQ ID NO: 3996 - protein, 12 aa, Homo sapiens
NAIWIDCGIHAR

SEQ ID NO: 3997 - protein, 10 aa, Homo sapiens
NALALFVLPK

SEQ ID NO: 3998 - protein, 11 aa, Homo sapiens
NALFCLESAWK

SEQ ID NO: 3999 - protein, 13 aa, Homo sapiens
NALGAIHHTISVR

SEQ ID NO: 4000 - protein, 19 aa, Homo sapiens
NALQNIILYHLTPGVFIGK

SEQ ID NO: 4001 - protein, 23 aa, Homo sapiens
NALTGLPPGLFQASATLDTLVLK

SEQ ID NO: 4002 - protein, 14 aa, Homo sapiens
NALWHTGDTESQVR

SEQ ID NO: 4003 - protein, 14 aa, Homo sapiens
NALWHTGNTPGQVR

SEQ ID NO: 4004 - protein, 17 aa, Homo sapiens
NAPAIIFIDELDAIAPK

SEQ ID NO: 4005 - protein, 9 aa, Homo sapiens
NAPTPQEFR

SEQ ID NO: 4006 - protein, 18 aa, Homo sapiens
NAVPPVIHSPNDHVVYEK

SEQ ID NO: 4007 - protein, 19 aa, Homo sapiens
NAVVQGLEQPHGLVVHPLR

SEQ ID NO: 4008 - protein, 10 aa, Homo sapiens
NDEMQETPNR

SEQ ID NO: 4009 - protein, 7 aa, Homo sapiens
NDFTWFK

SEQ ID NO: 4010 - protein, 8 aa, Homo sapiens
NDLISATK

SEQ ID NO: 4011 - protein, 8 aa, Homo sapiens
NDLVEALK

SEQ ID NO: 4012 - protein, 21 aa, Homo sapiens
NDNDNIFLSPLSISTAFAMTK

SEQ ID NO: 4013 - protein, 5 aa, Homo sapiens
NDPFK

SEQ ID NO: 4014 - protein, 13 aa, Homo sapiens
NDYLDIYAIGVGK

SEQ ID NO: 4015 - protein, 8 aa, Homo sapiens
NEADELRK

SEQ ID NO: 4016 - protein, 16 aa, Homo sapiens
NECFLQHKDDNPNLPR

SEQ ID NO: 4017 - protein, 12 aa, Homo sapiens
NEDSLVFVQTDK

SEQ ID NO: 4018 - protein, 22 aa, Homo sapiens
NEDSLVFVQTDKSIYKPGQTVK

SEQ ID NO: 4019 - protein, 6 aa, Homo sapiens
NEIWYR

SEQ ID NO: 4020 - protein, 11 aa, Homo sapiens
NELESYAYSLK

SEQ ID NO: 4021 - protein, 14 aa, Homo sapiens
NELIPLIYLENPRR

SEQ ID NO: 4022 - protein, 6 aa, Homo sapiens
NELVQK

SEQ ID NO: 4023 - protein, 18 aa, Homo sapiens
NENTFLDLTVQQIEHLNK

SEQ ID NO: 4024 - protein, 7 aa, Homo sapiens
NFATSNK

SEQ ID NO: 4025 - protein, 14 aa, Homo sapiens
NFATSNKMDMTFSK

SEQ ID NO: 4026 - protein, 7 aa, Homo sapiens
NFEITIK

SEQ ID NO: 4027 - protein, 10 aa, Homo sapiens
NFFNPPIISR

SEQ ID NO: 4028 - protein, 7 aa, Homo sapiens
NFGYTLR

SEQ ID NO: 4029 - protein, 10 aa, Homo sapiens
NFKNFEITIK

SEQ ID NO: 4030 - protein, 10 aa, Homo sapiens
NFLAFIQHLR

SEQ ID NO: 4031 - protein, 14 aa, Homo sapiens
NFPDLNTYIYYNEK

SEQ ID NO: 4032 - protein, 11 aa, Homo sapiens
NFPSPVDAAFR

SEQ ID NO: 4033 - protein, 21 aa, Homo sapiens
NFPSPVDAAFRQGHNSVFLIK

SEQ ID NO: 4034 - protein, 11 aa, Homo sapiens
NFSDNQLQEGK

SEQ ID NO: 4035 - protein, 19 aa, Homo sapiens
NFTEVHPDYGSHIQALLDK

SEQ ID NO: 4036 - protein, 6 aa, Homo sapiens
NFTVEK

SEQ ID NO: 4037 - protein, 22 aa, Homo sapiens
NFVASHIANILNSEELDIQDLK

SEQ ID NO: 4038 - protein, 23 aa, Homo sapiens
NFVASHIANILNSEELDIQDLKK

SEQ ID NO: 4039 - protein, 11 aa, Homo sapiens
NFVVVMVTKPK

SEQ ID NO: 4040 - protein, 8 aa, Homo sapiens
NGAIHIFR

SEQ ID NO: 4041 - protein, 8 aa, Homo sapiens
NGAVTHIK

SEQ ID NO: 4042 - protein, 8 aa, Homo sapiens
NGDLDEVK

SEQ ID NO: 4043 - protein, 13 aa, Homo sapiens
NGDLDEVKDYVAK

SEQ ID NO: 4044 - protein, 32 aa, Homo sapiens
NGESVKLHLETDSLALVALGALDTALYAAGSK

SEQ ID NO: 4045 - protein, 9 aa, Homo sapiens
NGFVMLSNK

SEQ ID NO: 4046 - protein, 10 aa, Homo sapiens
NGFVMLSNKK

SEQ ID NO: 4047 - protein, 8 aa, Homo sapiens
NGFYPATR

SEQ ID NO: 4048 - protein, 7 aa, Homo sapiens
NGITCQK

SEQ ID NO: 4049 - protein, 24 aa, Homo sapiens
NGKVGLSGMAIADVTLLSGFHALR

SEQ ID NO: 4050 - protein, 23 aa, Homo sapiens
NGLYADNDNDSTFTGFLLYHDTN

SEQ ID NO: 4051 - protein, 8 aa, Homo sapiens
NGMLHGDK

SEQ ID NO: 4052 - protein, 11 aa, Homo sapiens
NGNMAGISDQR

SEQ ID NO: 4053 - protein, 8 aa, Homo sapiens
NGPEQWSK

SEQ ID NO: 4054 - protein, 7 aa, Homo sapiens
NGQVEIK

SEQ ID NO: 4055 - protein, 9 aa, Homo sapiens
NGQWSEPPK

SEQ ID NO: 4056 - protein, 9 aa, Homo sapiens
NGRPLKEEK

SEQ ID NO: 4057 - protein, 14 aa, Homo sapiens
NGRVEIIANDQGNR

SEQ ID NO: 4058 - protein, 8 aa, Homo sapiens
NGSLFAFR

SEQ ID NO: 4059 - protein, 17 aa, Homo sapiens
NGTGHGNSTHHGPEYMR

SEQ ID NO: 4060 - protein, 45 aa, Homo sapiens
NGTGHGNSTHHGPEYMRCSPHLVLSALTSDNHGATYAFSGTHYWR

SEQ ID NO: 4061 - protein, 16 aa, Homo sapiens
NGVAQEPVHLDSPAIK

SEQ ID NO: 4062 - protein, 9 aa, Homo sapiens
NGVGVLIWK

SEQ ID NO: 4063 - protein, 26 aa, Homo sapiens
NGVNVISGPIFDYDYDGLHDTEDKIK

SEQ ID NO: 4064 - protein, 7 aa, Homo sapiens
NGYAYHK

SEQ ID NO: 4065 - protein, 11 aa, Homo sapiens
NHIIKDQLASK

SEQ ID NO: 4066 - protein, 18 aa, Homo sapiens
NHLQLEGLFFTNGEHTSK

SEQ ID NO: 4067 - protein, 10 aa, Homo sapiens
NHMQYEIVIK

SEQ ID NO: 4068 - protein, 13 aa, Homo sapiens
NHNALLASLTTQK

SEQ ID NO: 4069 - protein, 8 aa, Homo sapiens
NHQLIVTR

SEQ ID NO: 4070 - protein, 9 aa, Homo sapiens
NHQSSYQTR

SEQ ID NO: 4071 - protein, 10 aa, Homo sapiens
NIAAFGGNPK

SEQ ID NO: 4072 - protein, 5 aa, Homo sapiens
NIASR

SEQ ID NO: 4073 - protein, 22 aa, Homo sapiens
NIDNPALADIYTEHAHQVVVAK

SEQ ID NO: 4074 - protein, 10 aa, Homo sapiens
NIEKISMLEK

SEQ ID NO: 4075 - protein, 15 aa, Homo sapiens
NIETIINTFHQYSVK

SEQ ID NO: 4076 - protein, 6 aa, Homo sapiens
NIFNFK

SEQ ID NO: 4077 - protein, 15 aa, Homo sapiens
NIIFVETSFTTLETR

SEQ ID NO: 4078 - protein, 10 aa, Homo sapiens
NIIHGSDSVK

SEQ ID NO: 4079 - protein, 8 aa, Homo sapiens
NIILEEGK

SEQ ID NO: 4080 - protein, 28 aa, Homo sapiens
NIILEEGKEILVGDVGQTVDDPYATFVK

SEQ ID NO: 4081 - protein, 9 aa, Homo sapiens
NIILPVYDK

SEQ ID NO: 4082 - protein, 5 aa, Homo sapiens
NILDR

SEQ ID NO: 4083 - protein, 22 aa, Homo sapiens
NILDRQDPPSVVVTSHQAPGEK

SEQ ID NO: 4084 - protein, 12 aa, Homo sapiens
NILDSKPTANKK

SEQ ID NO: 4085 - protein, 16 aa, Homo sapiens
NILFVIDVSGSMWGVK

SEQ ID NO: 4086 - protein, 11 aa, Homo sapiens
NILTSNNIDVK

SEQ ID NO: 4087 - protein, 6 aa, Homo sapiens
NINQIK

SEQ ID NO: 4088 - protein, 6 aa, Homo sapiens
NINQLK

SEQ ID NO: 4089 - protein, 21 aa, Homo sapiens
NIPTVNENLENYYLEVNQLEK

SEQ ID NO: 4090 - protein, 15 aa, Homo sapiens
NIQEYLSILTDPDGK

SEQ ID NO: 4091 - protein, 17 aa, Homo sapiens
NIQEYLSILTDPDGKGK

SEQ ID NO: 4092 - protein, 10 aa, Homo sapiens
NIQSLEVIGK

SEQ ID NO: 4093 - protein, 27 aa, Homo sapiens
NISDGFDGIPDNVDAALALPAHSYSGR

SEQ ID NO: 4094 - protein, 7 aa, Homo sapiens
NISFNDK

SEQ ID NO: 4095 - protein, 6 aa, Homo sapiens
NIVTPR

SEQ ID NO: 4096 - protein, 11 aa, Homo sapiens
NKEDCVEIYIK

SEQ ID NO: 4097 - protein, 10 aa, Homo sapiens
NKFDPSLTQR

SEQ ID NO: 4098 - protein, 8 aa, Homo sapiens
NKFEEAER

SEQ ID NO: 4099 - protein, 7 aa, Homo sapiens
NKGPTVK

SEQ ID NO: 4100 - protein, 14 aa, Homo sapiens
NKLDFLRPYTVPNK

SEQ ID NO: 4101 - protein, 12 aa, Homo sapiens
NKLEGLEDALQK

SEQ ID NO: 4102 - protein, 14 aa, Homo sapiens
NKLNDLEDALQQAK

SEQ ID NO: 4103 - protein, 14 aa, Homo sapiens
NKLNDLEEALQQAK

SEQ ID NO: 4104 - protein, 7 aa, Homo sapiens
NKLTQSK

SEQ ID NO: 4105 - protein, 8 aa, Homo sapiens
NKPEWFFK

SEQ ID NO: 4106 - protein, 17 aa, Homo sapiens
NKPGVYTDVAYYLAWIR

SEQ ID NO: 4107 - protein, 8 aa, Homo sapiens
NKPGVYTK

SEQ ID NO: 4108 - protein, 9 aa, Homo sapiens
NKYEDEINK

SEQ ID NO: 4109 - protein, 14 aa, Homo sapiens
NKYGMVAQVTQTLK

SEQ ID NO: 4110 - protein, 5 aa, Homo sapiens
NLASR

SEQ ID NO: 4111 - protein, 18 aa, Homo sapiens
NLASRPYSLHAHGLSYEK

SEQ ID NO: 4112 - protein, 18 aa, Homo sapiens
NLASRPYTFHSHGITYYK

SEQ ID NO: 4113 - protein, 10 aa, Homo sapiens
NLAVSQVVHK

SEQ ID NO: 4114 - protein, 29 aa, Homo sapiens
NLAVSQVVHKAVLDVFEEGTEASAATAVK

SEQ ID NO: 4115 - protein, 14 aa, Homo sapiens
NLCEAMENFMQQLK

SEQ ID NO: 4116 - protein, 8 aa, Homo sapiens
NLDENYCR

SEQ ID NO: 4117 - protein, 13 aa, Homo sapiens
NLDGISHAPNAVK

SEQ ID NO: 4118 - protein, 14 aa, Homo sapiens
NLDIERPTYTNLNR

SEQ ID NO: 4119 - protein, 12 aa, Homo sapiens
NLDLDSIIAEVK

SEQ ID NO: 4120 - protein, 17 aa, Homo sapiens
NLDSNAVVIMVNYIFFK

SEQ ID NO: 4121 - protein, 16 aa, Homo sapiens
NLELGLTQGSFAFIHK

SEQ ID NO: 4122 - protein, 12 aa, Homo sapiens
NLFRPSLPSSWK

SEQ ID NO: 4123 - protein, 13 aa, Homo sapiens
NLFYLPHGLSIDK

SEQ ID NO: 4124 - protein, 10 aa, Homo sapiens
NLGTALAELR

SEQ ID NO: 4125 - protein, 14 aa, Homo sapiens
NLHDLDVSDNQLER

SEQ ID NO: 4126 - protein, 14 aa, Homo sapiens
NLHFLTTQEDYTLK

SEQ ID NO: 4127 - protein, 15 aa, Homo sapiens
NLIAAVAPGAFLGLK

SEQ ID NO: 4128 - protein, 21 aa, Homo sapiens
NLIAVLGEHDLSEHDGDEQSR

SEQ ID NO: 4129 - protein, 22 aa, Homo sapiens
NLIAVLGEHDLSEHDGDEQSRR

SEQ ID NO: 4130 - protein, 5 aa, Homo sapiens
NLIDR

SEQ ID NO: 4131 - protein, 12 aa, Homo sapiens
NLKHINIDQFVR

SEQ ID NO: 4132 - protein, 5 aa, Homo sapiens
NLLDR

SEQ ID NO: 4133 - protein, 14 aa, Homo sapiens
NLLHVTDTGVGMTR

SEQ ID NO: 4134 - protein, 15 aa, Homo sapiens
NLLLVRPLGPQASIR

SEQ ID NO: 4135 - protein, 8 aa, Homo sapiens
NLLSVAYK

SEQ ID NO: 4136 - protein, 8 aa, Homo sapiens
NLMHLDLK

SEQ ID NO: 4137 - protein, 14 aa, Homo sapiens
NLMYVDIPIVDHQK

SEQ ID NO: 4138 - protein, 16 aa, Homo sapiens
NLNEKDYELLCLDGTR

SEQ ID NO: 4139 - protein, 8 aa, Homo sapiens
NLPEQVFR

SEQ ID NO: 4140 - protein, 8 aa, Homo sapiens
NLPNGDFR

SEQ ID NO: 4141 - protein, 15 aa, Homo sapiens
NLQNNAEWVYQGAIR

SEQ ID NO: 4142 - protein, 16 aa, Homo sapiens
NLQPASEYTVSLVAIK

SEQ ID NO: 4143 - protein, 23 aa, Homo sapiens
NLQPASEYTVSLVAIKGNQESPK

SEQ ID NO: 4144 - protein, 10 aa, Homo sapiens
NLSLNSQALK

SEQ ID NO: 4145 - protein, 6 aa, Homo sapiens
NLSMQK

SEQ ID NO: 4146 - protein, 9 aa, Homo sapiens
NLSVEDAAR

SEQ ID NO: 4147 - protein, 16 aa, Homo sapiens
NLTDFAEQYSIQDWAK

SEQ ID NO: 4148 - protein, 6 aa, Homo sapiens
NLTLTR

SEQ ID NO: 4149 - protein, 35 aa, Homo sapiens
NLVINCEVFDPQEHENINGVPPHLGHPFHWGGHER

SEQ ID NO: 4150 - protein, 22 aa, Homo sapiens
NLVLHSARPGAPPPQPLDLQHR

SEQ ID NO: 4151 - protein, 5 aa, Homo sapiens
NLWEK

SEQ ID NO: 4152 - protein, 35 aa, Homo sapiens
NMATRPYSIHAHGVQTESSTVTPTLPGETLTYVWK

SEQ ID NO: 4153 - protein, 16 aa, Homo sapiens
NMEQFQVSVSVAPNAK

SEQ ID NO: 4154 - protein, 8 aa, Homo sapiens
NMEVFFPK

SEQ ID NO: 4155 - protein, 11 aa, Homo sapiens
NMEVSVATTTK

SEQ ID NO: 4156 - protein, 12 aa, Homo sapiens
NMNKEDEGEITK

SEQ ID NO: 4157 - protein, 10 aa, Homo sapiens
NMQDLVEDFK

SEQ ID NO: 4158 - protein, 10 aa, Homo sapiens
NMQDMVEDYR

SEQ ID NO: 4159 - protein, 9 aa, Homo sapiens
NNALDFVTK

SEQ ID NO: 4160 - protein, 10 aa, Homo sapiens
NNANGVDLNR

SEQ ID NO: 4161 - protein, 12 aa, Homo sapiens
NNEEYLALIFEK

SEQ ID NO: 4162 - protein, 16 aa, Homo sapiens
NNEGTYYSPNYNPQSR

SEQ ID NO: 4163 - protein, 9 aa, Homo sapiens
NNFEGEVTK

SEQ ID NO: 4164 - protein, 6 aa, Homo sapiens
NNFVIR

SEQ ID NO: 4165 - protein, 17 aa, Homo sapiens
NNKDSHSLTTNIMEILR

SEQ ID NO: 4166 - protein, 10 aa, Homo sapiens
NNLELSTPLK

SEQ ID NO: 4167 - protein, 21 aa, Homo sapiens
NNLELSTPLKIETISHEDLQR

SEQ ID NO: 4168 - protein, 6 aa, Homo sapiens
NNLLLK

SEQ ID NO: 4169 - protein, 11 aa, Homo sapiens
NNPSKPLHVIK

SEQ ID NO: 4170 - protein, 10 aa, Homo sapiens
NNQIDHIDEK

SEQ ID NO: 4171 - protein, 16 aa, Homo sapiens
NNRWEDILSDEVNVAR

SEQ ID NO: 4172 - protein, 13 aa, Homo sapiens
NNTVGLIQLNRPK

SEQ ID NO: 4173 - protein, 8 aa, Homo sapiens
NNVPCSPK

SEQ ID NO: 4174 - protein, 8 aa, Homo sapiens
NNVVSVNK

SEQ ID NO: 4175 - protein, 15 aa, Homo sapiens
NPADPQRIPSNPSHR

SEQ ID NO: 4176 - protein, 8 aa, Homo sapiens
NPANPVQR

SEQ ID NO: 4177 - protein, 13 aa, Homo sapiens
NPDADEKPWCFIK

SEQ ID NO: 4178 - protein, 14 aa, Homo sapiens
NPDNDERPWCYVVK

SEQ ID NO: 4179 - protein, 15 aa, Homo sapiens
NPDNDIRPWCFVLNR

SEQ ID NO: 4180 - protein, 18 aa, Homo sapiens
NPDNDPQGPWCYTTDPEK

SEQ ID NO: 4181 - protein, 19 aa, Homo sapiens
NPDNDPQGPWCYTTDPEKR

SEQ ID NO: 4182 - protein, 7 aa, Homo sapiens
NPDPWAK

SEQ ID NO: 4183 - protein, 21 aa, Homo sapiens
NPFVFAPTLLTVAVHFEEVAK

SEQ ID NO: 4184 - protein, 15 aa, Homo sapiens
NPGNQAAYEHFETMK

SEQ ID NO: 4185 - protein, 59 aa, Homo sapiens
NPGSSGTGGTATWKPGSSGPGSTGSWNSGSSGTGSTGNQNPGSPRPGSTGTWNPGSSER

SEQ ID NO: 4186 - protein, 17 aa, Homo sapiens
NPHPSSAFLNLIGFVSR

SEQ ID NO: 4187 - protein, 6 aa, Homo sapiens
NPLPSK

SEQ ID NO: 4188 - protein, 13 aa, Homo sapiens
NPLPSKETIEQEK

SEQ ID NO: 4189 - protein, 17 aa, Homo sapiens
NPLVWVHASPEHVVVTR

SEQ ID NO: 4190 - protein, 12 aa, Homo sapiens
NPNGYSFSIPVK

SEQ ID NO: 4191 - protein, 8 aa, Homo sapiens
NPNPSAPR

SEQ ID NO: 4192 - protein, 29 aa, Homo sapiens
NPREDYLDVYVFGVGPLVNQVNINALASK

SEQ ID NO: 4193 - protein, 30 aa, Homo sapiens
NPSDPMPQAPALWIETTAYALLHLLLHEGK

SEQ ID NO: 4194 - protein, 21 aa, Homo sapiens
NPSSAGSWNSGSSGPGSTGNR

SEQ ID NO: 4195 - protein, 80 aa, Homo sapiens
NPSSAGSWNSGSSGPGSTGNRNPGSSGTGGTATWKPGSSGPGSTGSWNSGSSGTGSTGNQNPGSPRPGSTGTWNPGSSER

SEQ ID NO: 4196 - protein, 6 aa, Homo sapiens
NQDHAK

SEQ ID NO: 4197 - protein, 21 aa, Homo sapiens
NQDVHSINLPFFETLQEYFER

SEQ ID NO: 4198 - protein, 9 aa, Homo sapiens
NQFNDYTSK

SEQ ID NO: 4199 - protein, 10 aa, Homo sapiens
NQFNDYTSKK

SEQ ID NO: 4200 - protein, 6 aa, Homo sapiens
NQFSLK

SEQ ID NO: 4201 - protein, 9 aa, Homo sapiens
NQGIEEALK

SEQ ID NO: 4202 - protein, 16 aa, Homo sapiens
NQGILEFYGDDIALLK

SEQ ID NO: 4203 - protein, 13 aa, Homo sapiens
NQGNTWLTAFVLK

SEQ ID NO: 4204 - protein, 19 aa, Homo sapiens
NQGNTWLTAFVLKTFAQAR

SEQ ID NO: 4205 - protein, 15 aa, Homo sapiens
NQLTSNPENTVFDAK

SEQ ID NO: 4206 - protein, 14 aa, Homo sapiens
NQTAEKEEFEHQQK

SEQ ID NO: 4207 - protein, 11 aa, Homo sapiens
NQTANLTNQGK

SEQ ID NO: 4208 - protein, 9 aa, Homo sapiens
NQVVIAAGR

SEQ ID NO: 4209 - protein, 15 aa, Homo sapiens
NRDVVLTTTFVDDIK

SEQ ID NO: 4210 - protein, 11 aa, Homo sapiens
NRNNALDFVTK

SEQ ID NO: 4211 - protein, 12 aa, Homo sapiens
NRNVHSGSTFFK

SEQ ID NO: 4212 - protein, 26 aa, Homo sapiens
NRQEGLMIASSLLNEGYLQPAGDMSK

SEQ ID NO: 4213 - protein, 7 aa, Homo sapiens
NRVVLAK

SEQ ID NO: 4214 - protein, 11 aa, Homo sapiens
NSEEFAAAMSR

SEQ ID NO: 4215 - protein, 10 aa, Homo sapiens
NSGLTEEEAK

SEQ ID NO: 4216 - protein, 8 aa, Homo sapiens
NSIEIIIK

SEQ ID NO: 4217 - protein, 42 aa, Homo sapiens
NSITLTNLTPGTEYVVSIVALNGREESPLLIGQQSTVSDVPR

SEQ ID NO: 4218 - protein, 11 aa, Homo sapiens
NSKIEISELNR

SEQ ID NO: 4219 - protein, 8 aa, Homo sapiens
NSLFEYQK

SEQ ID NO: 4220 - protein, 11 aa, Homo sapiens
NSLFEYQKNNK

SEQ ID NO: 4221 - protein, 23 aa, Homo sapiens
NSLFFSAQPFEITASTNNEGNLK

SEQ ID NO: 4222 - protein, 14 aa, Homo sapiens
NSLKIEIPLPFGGK

SEQ ID NO: 4223 - protein, 14 aa, Homo sapiens
NSLWHTGDTSDQVR

SEQ ID NO: 4224 - protein, 11 aa, Homo sapiens
NSLYLQMNSLR

SEQ ID NO: 4225 - protein, 12 aa, Homo sapiens
NSNPALNDNLEK

SEQ ID NO: 4226 - protein, 12 aa, Homo sapiens
NSRPEANEALER

SEQ ID NO: 4227 - protein, 28 aa, Homo sapiens
NSVDELNNNVEAVSQTSSSSFQYMYLLK

SEQ ID NO: 4228 - protein, 12 aa, Homo sapiens
NSVIKVPMMNSK

SEQ ID NO: 4229 - protein, 11 aa, Homo sapiens
NTAEWLLSHTK

SEQ ID NO: 4230 - protein, 15 aa, Homo sapiens
NTASLKYENYELTLK

SEQ ID NO: 4231 - protein, 23 aa, Homo sapiens
NTEILTGSWSDQTYPEGTQAIYK

SEQ ID NO: 4232 - protein, 21 aa, Homo sapiens
NTEISFILGQEFDEVTADDRK

SEQ ID NO: 4233 - protein, 19 aa, Homo sapiens
NTEQEEGGEAVHEVEVVIK

SEQ ID NO: 4234 - protein, 18 aa, Homo sapiens
NTFAEVTGLSPGVTYYFK

SEQ ID NO: 4235 - protein, 26 aa, Homo sapiens
NTFAEVTGLSPGVTYYFKVFAVSHGR

SEQ ID NO: 4236 - protein, 21 aa, Homo sapiens
NTGREEFLTAFLQNYQLAYSK

SEQ ID NO: 4237 - protein, 12 aa, Homo sapiens
NTLELSNGVIVK

SEQ ID NO: 4238 - protein, 9 aa, Homo sapiens
NTLIIYLDK

SEQ ID NO: 4239 - protein, 11 aa, Homo sapiens
NTLYLQMNSLR

SEQ ID NO: 4240 - protein, 28 aa, Homo sapiens
NTVLVLNTQSLVFVQTDKPMYKPGQTVR

SEQ ID NO: 4241 - protein, 8 aa, Homo sapiens
NTVVPTKK

SEQ ID NO: 4242 - protein, 26 aa, Homo sapiens
NTWSILHTQGALVQGGYGHSSVYDHR

SEQ ID NO: 4243 - protein, 9 aa, Homo sapiens
NTYSSLEGK

SEQ ID NO: 4244 - protein, 13 aa, Homo sapiens
NVALVSGDTENAK

SEQ ID NO: 4245 - protein, 6 aa, Homo sapiens
NVDEFK

SEQ ID NO: 4246 - protein, 18 aa, Homo sapiens
NVDLLSDMVQEHDEPILK

SEQ ID NO: 4247 - protein, 23 aa, Homo sapiens
NVFIIGATNRPDIIDPAILRPGR

SEQ ID NO: 4248 - protein, 12 aa, Homo sapiens
NVHGINFVSPVR

SEQ ID NO: 4249 - protein, 11 aa, Homo sapiens
NVHSAGAAGSR

SEQ ID NO: 4250 - protein, 10 aa, Homo sapiens
NVHSGSTFFK

SEQ ID NO: 4251 - protein, 11 aa, Homo sapiens
NVIGLQMGTNR

SEQ ID NO: 4252 - protein, 6 aa, Homo sapiens
NVLINK

SEQ ID NO: 4253 - protein, 19 aa, Homo sapiens
NVLVTLYERDEDNNLLTEK

SEQ ID NO: 4254 - protein, 6 aa, Homo sapiens
NVNFQK

SEQ ID NO: 4255 - protein, 6 aa, Homo sapiens
NVNIFK

SEQ ID NO: 4256 - protein, 12 aa, Homo sapiens
NVNIQNFHISWK

SEQ ID NO: 4257 - protein, 12 aa, Homo sapiens
NVNVQNFHISWK

SEQ ID NO: 4258 - protein, 10 aa, Homo sapiens
NVPFSELNLK

SEQ ID NO: 4259 - protein, 16 aa, Homo sapiens
NVQALEIELQSQLALK

SEQ ID NO: 4260 - protein, 18 aa, Homo sapiens
NVQDAIADAEQRGEHALK

SEQ ID NO: 4261 - protein, 33 aa, Homo sapiens
NVQFNYPHTSVTDVTQNNFHNYFGGSEIVVAGK

SEQ ID NO: 4262 - protein, 8 aa, Homo sapiens
NVRPDYLK

SEQ ID NO: 4263 - protein, 7 aa, Homo sapiens
NVTNNLK

SEQ ID NO: 4264 - protein, 9 aa, Homo sapiens
NVTSMINLK

SEQ ID NO: 4265 - protein, 13 aa, Homo sapiens
NVVFVIDISGSMR

SEQ ID NO: 4266 - protein, 8 aa, Homo sapiens
NVVFVIDK

SEQ ID NO: 4267 - protein, 16 aa, Homo sapiens
NVWVHLDGPGVTRPMK

SEQ ID NO: 4268 - protein, 14 aa, Homo sapiens
NWETEITAQPDGGK

SEQ ID NO: 4269 - protein, 28 aa, Homo sapiens
NWETEITAQPDGGKTENCAVLSGAANGK

SEQ ID NO: 4270 - protein, 11 aa, Homo sapiens
NWGLGGHAFCR

SEQ ID NO: 4271 - protein, 15 aa, Homo sapiens
NWGLSFYADKPETTK

SEQ ID NO: 4272 - protein, 15 aa, Homo sapiens
NWGLSVYADKPETTK

SEQ ID NO: 4273 - protein, 29 aa, Homo sapiens
NWGLSVYADKPETTKEQLGEFYEALDCLR

SEQ ID NO: 4274 - protein, 6 aa, Homo sapiens
NWIQYK

SEQ ID NO: 4275 - protein, 11 aa, Homo sapiens
NWMNSLGVNPR

SEQ ID NO: 4276 - protein, 25 aa, Homo sapiens
NWRDPDQTDGLGLSYLSSHIANVER

SEQ ID NO: 4277 - protein, 19 aa, Homo sapiens
NYAEAKDVFLGMFLYEYAR

SEQ ID NO: 4278 - protein, 15 aa, Homo sapiens
NYCGLPGEYWLGNDK

SEQ ID NO: 4279 - protein, 8 aa, Homo sapiens
NYEEEILR

SEQ ID NO: 4280 - protein, 9 aa, Homo sapiens
NYNLVESLK

SEQ ID NO: 4281 - protein, 14 aa, Homo sapiens
NYNLVESLKLMGIR

SEQ ID NO: 4282 - protein, 10 aa, Homo sapiens
NYPMHVFAYR

SEQ ID NO: 4283 - protein, 6 aa, Homo sapiens
NYQLYK

SEQ ID NO: 4284 - protein, 25 aa, Homo sapiens
NYSPYYNTIDDLKDQIVDLTVGNNK

SEQ ID NO: 4285 - protein, 8 aa, Homo sapiens
NYVDWIMK

SEQ ID NO: 4286 - protein, 11 aa, Homo sapiens
PMFIVNTNVPR

SEQ ID NO: 4287 - protein, 11 aa, Homo sapiens
PPYTVVYFPVR

SEQ ID NO: 4288 - protein, 5 aa, Homo sapiens
PYEIK

SEQ ID NO: 4289 - protein, 12 aa, Homo sapiens
PYQYPALTPEQK

SEQ ID NO: 4290 - protein, 21 aa, Homo sapiens
QAAASATQTIAAAQHAASTPK

SEQ ID NO: 4291 - protein, 28 aa, Homo sapiens
QAAGSGHLLALGTPENPSWLSLHLQDQK

SEQ ID NO: 4292 - protein, 7 aa, Homo sapiens
QAEAVLK

SEQ ID NO: 4293 - protein, 13 aa, Homo sapiens
QAEISASAPTSLR

SEQ ID NO: 4294 - protein, 13 aa, Homo sapiens
QAGLGNHLSGSER

SEQ ID NO: 4295 - protein, 8 aa, Homo sapiens
QAIQASHK

SEQ ID NO: 4296 - protein, 9 aa, Homo sapiens
QAIQASHKK

SEQ ID NO: 4297 - protein, 15 aa, Homo sapiens
QALAQSEPGQLADSK

SEQ ID NO: 4298 - protein, 8 aa, Homo sapiens
QALEEFQK

SEQ ID NO: 4299 - protein, 8 aa, Homo sapiens
QALEFQLK

SEQ ID NO: 4300 - protein, 6 aa, Homo sapiens
QALELK

SEQ ID NO: 4301 - protein, 18 aa, Homo sapiens
QAMGELSELSFHYLIMAK

SEQ ID NO: 4302 - protein, 13 aa, Homo sapiens
QAVDTAVDGVFIR

SEQ ID NO: 4303 - protein, 14 aa, Homo sapiens
QCSKEDGGGWWYNR

SEQ ID NO: 4304 - protein, 14 aa, Homo sapiens
QDEEKPLHALLHGR

SEQ ID NO: 4305 - protein, 18 aa, Homo sapiens
QDGHLWCSTTSNYEQDQK

SEQ ID NO: 4306 - protein, 9 aa, Homo sapiens
QDGSVDFFR

SEQ ID NO: 4307 - protein, 9 aa, Homo sapiens
QDGSVDFGR

SEQ ID NO: 4308 - protein, 10 aa, Homo sapiens
QDGSVDFGRK

SEQ ID NO: 4309 - protein, 11 aa, Homo sapiens
QDNEILIFWSK

SEQ ID NO: 4310 - protein, 17 aa, Homo sapiens
QDPPSVVVTSHQAPGEK

SEQ ID NO: 4311 - protein, 12 aa, Homo sapiens
QDRDLEEPINFR

SEQ ID NO: 4312 - protein, 7 aa, Homo sapiens
QDSQLQK

SEQ ID NO: 4313 - protein, 24 aa, Homo sapiens
QEALELMNQNLDIYEQQVMTAAQK

SEQ ID NO: 4314 - protein, 13 aa, Homo sapiens
QEDDLANINQWVK

SEQ ID NO: 4315 - protein, 8 aa, Homo sapiens
QEELCLAR

SEQ ID NO: 4316 - protein, 5 aa, Homo sapiens
QEIFR

SEQ ID NO: 4317 - protein, 12 aa, Homo sapiens
QEINSHVEMQTK

SEQ ID NO: 4318 - protein, 5 aa, Homo sapiens
QELFR

SEQ ID NO: 4319 - protein, 14 aa, Homo sapiens
QEPGENSEILPTLK

SEQ ID NO: 4320 - protein, 13 aa, Homo sapiens
QEYDESGPSIVHR

SEQ ID NO: 4321 - protein, 9 aa, Homo sapiens
QEYEQLIAK

SEQ ID NO: 4322 - protein, 6 aa, Homo sapiens
QFFHLN

SEQ ID NO: 4323 - protein, 19 aa, Homo sapiens
QFGPYCGHGFPGPLNIETK

SEQ ID NO: 4324 - protein, 8 aa, Homo sapiens
QFHGLLVK

SEQ ID NO: 4325 - protein, 9 aa, Homo sapiens
QFPILLDFK

SEQ ID NO: 4326 - protein, 11 aa, Homo sapiens
QFPILLDFKTK

SEQ ID NO: 4327 - protein, 16 aa, Homo sapiens
QFSFPLSSEPFQGSYK

SEQ ID NO: 4328 - protein, 10 aa, Homo sapiens
QFTSSTSYNR

SEQ ID NO: 4329 - protein, 18 aa, Homo sapiens
QFTSSTSYNRGDSTFESK

SEQ ID NO: 4330 - protein, 6 aa, Homo sapiens
QFVHIK

SEQ ID NO: 4331 - protein, 8 aa, Homo sapiens
QGALELIK

SEQ ID NO: 4332 - protein, 9 aa, Homo sapiens
QGALELIKK

SEQ ID NO: 4333 - protein, 8 aa, Homo sapiens
QGDVECQR

SEQ ID NO: 4334 - protein, 6 aa, Homo sapiens
QGELNK

SEQ ID NO: 4335 - protein, 14 aa, Homo sapiens
QGETLNFLEIGYSR

SEQ ID NO: 4336 - protein, 10 aa, Homo sapiens
QGFFPDSVNK

SEQ ID NO: 4337 - protein, 13 aa, Homo sapiens
QGFGNVATNTDGK

SEQ ID NO: 4338 - protein, 18 aa, Homo sapiens
QGHFYGETAAVYVAVEER

SEQ ID NO: 4339 - protein, 10 aa, Homo sapiens
QGHNSVFLIK

SEQ ID NO: 4340 - protein, 13 aa, Homo sapiens
QGHNSVFLIKGDK

SEQ ID NO: 4341 - protein, 15 aa, Homo sapiens
QGIPFFAQVLLVDGK

SEQ ID NO: 4342 - protein, 10 aa, Homo sapiens
QGIPFFGQVR

SEQ ID NO: 4343 - protein, 11 aa, Homo sapiens
QGLLPVLESFK

SEQ ID NO: 4344 - protein, 22 aa, Homo sapiens
QGPVNLLSDPEQGVEVTGQYER

SEQ ID NO: 4345 - protein, 9 aa, Homo sapiens
QGSFQGGFR

SEQ ID NO: 4346 - protein, 10 aa, Homo sapiens
QGYFVEAQPK

SEQ ID NO: 4347 - protein, 27 aa, Homo sapiens
QGYQLIEGNQVLHSFTAVCQDDGTWHR

SEQ ID NO: 4348 - protein, 9 aa, Homo sapiens
QHDMGHMMR

SEQ ID NO: 4349 - protein, 14 aa, Homo sapiens
QHFSQEALLSVAHR

SEQ ID NO: 4350 - protein, 8 aa, Homo sapiens
QHFTTLIK

SEQ ID NO: 4351 - protein, 9 aa, Homo sapiens
QHIEAIDVR

SEQ ID NO: 4352 - protein, 6 aa, Homo sapiens
QHLFVK

SEQ ID NO: 4353 - protein, 12 aa, Homo sapiens
QHLGDVLNFLPL

SEQ ID NO: 4354 - protein, 7 aa, Homo sapiens
QHLPLIK

SEQ ID NO: 4355 - protein, 15 aa, Homo sapiens
QHPVPPPAQNQNQVR

SEQ ID NO: 4356 - protein, 15 aa, Homo sapiens
QHQLGVWPLLPGSFK

SEQ ID NO: 4357 - protein, 17 aa, Homo sapiens
QHVVSVEEALLATGQWK

SEQ ID NO: 4358 - protein, 20 aa, Homo sapiens
QHVVYGPWNLPQSSYSHLTR

SEQ ID NO: 4359 - protein, 7 aa, Homo sapiens
QHWVVFK

SEQ ID NO: 4360 - protein, 14 aa, Homo sapiens
QIATLHAQVADMKK

SEQ ID NO: 4361 - protein, 8 aa, Homo sapiens
QIDDIDVR

SEQ ID NO: 4362 - protein, 8 aa, Homo sapiens
QIDNPDYK

SEQ ID NO: 4363 - protein, 5 aa, Homo sapiens
QIDYK

SEQ ID NO: 4364 - protein, 7 aa, Homo sapiens
QIGSVYR

SEQ ID NO: 4365 - protein, 6 aa, Homo sapiens
QINDLK

SEQ ID NO: 4366 - protein, 8 aa, Homo sapiens
QINDYVAK

SEQ ID NO: 4367 - protein, 8 aa, Homo sapiens
QINDYVEK

SEQ ID NO: 4368 - protein, 13 aa, Homo sapiens
QINDYVEKGTQGK

SEQ ID NO: 4369 - protein, 7 aa, Homo sapiens
QINSYVK

SEQ ID NO: 4370 - protein, 5 aa, Homo sapiens
QINYK

SEQ ID NO: 4371 - protein, 6 aa, Homo sapiens
QIQNIK

SEQ ID NO: 4372 - protein, 5 aa, Homo sapiens
QIQVK

SEQ ID NO: 4373 - protein, 11 aa, Homo sapiens
QITVNDLPVGR

SEQ ID NO: 4374 - protein, 13 aa, Homo sapiens
QIVLLFAVFDESK

SEQ ID NO: 4375 - protein, 6 aa, Homo sapiens
QIVVDK

SEQ ID NO: 4376 - protein, 11 aa, Homo sapiens
QKFQSVFTVTR

SEQ ID NO: 4377 - protein, 9 aa, Homo sapiens
QKLHELQEK

SEQ ID NO: 4378 - protein, 17 aa, Homo sapiens
QKLQTVLEAVHDLLRPR

SEQ ID NO: 4379 - protein, 11 aa, Homo sapiens
QKLTPLYELVK

SEQ ID NO: 4380 - protein, 23 aa, Homo sapiens
QKPDGVFQEDAPVIHQEMIGGLR

SEQ ID NO: 4381 - protein, 29 aa, Homo sapiens
QKTGLDSPTGIDFSDITANSFTVHWIAPR

SEQ ID NO: 4382 - protein, 7 aa, Homo sapiens
QKVEPLR

SEQ ID NO: 4383 - protein, 12 aa, Homo sapiens
QKWEAEPVYVQR

SEQ ID NO: 4384 - protein, 7 aa, Homo sapiens
QLAVLDK

SEQ ID NO: 4385 - protein, 7 aa, Homo sapiens
QLEDALK

SEQ ID NO: 4386 - protein, 7 aa, Homo sapiens
QLEEQLR

SEQ ID NO: 4387 - protein, 6 aa, Homo sapiens
QLEIYK

SEQ ID NO: 4388 - protein, 8 aa, Homo sapiens
QLELYLPK

SEQ ID NO: 4389 - protein, 6 aa, Homo sapiens
QLENLK

SEQ ID NO: 4390 - protein, 8 aa, Homo sapiens
QLEQVIAK

SEQ ID NO: 4391 - protein, 8 aa, Homo sapiens
QLEWGLER

SEQ ID NO: 4392 - protein, 12 aa, Homo sapiens
QLFHPEQLITGK

SEQ ID NO: 4393 - protein, 13 aa, Homo sapiens
QLGAGSIEECAAK

SEQ ID NO: 4394 - protein, 15 aa, Homo sapiens
QLGKLLLSTLTLLSK

SEQ ID NO: 4395 - protein, 20 aa, Homo sapiens
QLGLPGPPDVPDHAAYHPFR

SEQ ID NO: 4396 - protein, 21 aa, Homo sapiens
QLGLPGPPDVPDHAAYHPFRR

SEQ ID NO: 4397 - protein, 9 aa, Homo sapiens
QLHGLLQAR

SEQ ID NO: 4398 - protein, 6 aa, Homo sapiens
QLIEEK

SEQ ID NO: 4399 - protein, 6 aa, Homo sapiens
QLLAER

SEQ ID NO: 4400 - protein, 6 aa, Homo sapiens
QLLDAK

SEQ ID NO: 4401 - protein, 6 aa, Homo sapiens
QLLEEK

SEQ ID NO: 4402 - protein, 14 aa, Homo sapiens
QLLGSAHAVEVFHR

SEQ ID NO: 4403 - protein, 6 aa, Homo sapiens
QLLSER

SEQ ID NO: 4404 - protein, 11 aa, Homo sapiens
QLNEINYEDHK

SEQ ID NO: 4405 - protein, 13 aa, Homo sapiens
QLNEINYEDHKLK

SEQ ID NO: 4406 - protein, 5 aa, Homo sapiens
QLNIK

SEQ ID NO: 4407 - protein, 5 aa, Homo sapiens
QLNLK

SEQ ID NO: 4408 - protein, 10 aa, Homo sapiens
QLNQQHSQIK

SEQ ID NO: 4409 - protein, 5 aa, Homo sapiens
QLNYK

SEQ ID NO: 4410 - protein, 17 aa, Homo sapiens
QLNYKHYDGSYSTFGER

SEQ ID NO: 4411 - protein, 19 aa, Homo sapiens
QLPGGQNPVSYVYLEVVSK

SEQ ID NO: 4412 - protein, 23 aa, Homo sapiens
QLPGGQNPVSYVYLEVVSKHFSK

SEQ ID NO: 4413 - protein, 11 aa, Homo sapiens
QLPNHRVLIMK

SEQ ID NO: 4414 - protein, 13 aa, Homo sapiens
QLSFEEFIMLMAR

SEQ ID NO: 4415 - protein, 8 aa, Homo sapiens
QLTPYAQR

SEQ ID NO: 4416 - protein, 18 aa, Homo sapiens
QLTSGPNQEQVSPLTLLK

SEQ ID NO: 4417 - protein, 7 aa, Homo sapiens
QLVEIEK

SEQ ID NO: 4418 - protein, 20 aa, Homo sapiens
QLVFHIGHGDLGSPAVLVSR

SEQ ID NO: 4419 - protein, 20 aa, Homo sapiens
QLVHHFEIDVDIFEPQGISK

SEQ ID NO: 4420 - protein, 5 aa, Homo sapiens
QLVIK

SEQ ID NO: 4421 - protein, 5 aa, Homo sapiens
QLVLK

SEQ ID NO: 4422 - protein, 9 aa, Homo sapiens
QLVLKAPDK

SEQ ID NO: 4423 - protein, 11 aa, Homo sapiens
QLYGDTGVLGR

SEQ ID NO: 4424 - protein, 5 aa, Homo sapiens
QLYHK

SEQ ID NO: 4425 - protein, 19 aa, Homo sapiens
QLYNVEATSYALLALLQLK

SEQ ID NO: 4426 - protein, 29 aa, Homo sapiens
QLYNVEATSYALLALLQLKDFDFVPPVVR

SEQ ID NO: 4427 - protein, 10 aa, Homo sapiens
QMSKYPSGER

SEQ ID NO: 4428 - protein, 13 aa, Homo sapiens
QNCELFEQLGEYK

SEQ ID NO: 4429 - protein, 10 aa, Homo sapiens
QNDFNSVEEK

SEQ ID NO: 4430 - protein, 11 aa, Homo sapiens
QNDFNSVEEKK

SEQ ID NO: 4431 - protein, 12 aa, Homo sapiens
QNIDGHGSDDSK

SEQ ID NO: 4432 - protein, 16 aa, Homo sapiens
QNLEPLFEQYINNLRR

SEQ ID NO: 4433 - protein, 17 aa, Homo sapiens
QPFVQGLALYTPVVLPR

SEQ ID NO: 4434 - protein, 7 aa, Homo sapiens
QPQFISR

SEQ ID NO: 4435 - protein, 11 aa, Homo sapiens
QPSSAFAAFVK

SEQ ID NO: 4436 - protein, 12 aa, Homo sapiens
QPSSAFAAFVKR

SEQ ID NO: 4437 - protein, 6 aa, Homo sapiens
QPWQAK

SEQ ID NO: 4438 - protein, 31 aa, Homo sapiens
QPYSYDFPEDVAPALGTSFSHMLGATNPTQK

SEQ ID NO: 4439 - protein, 14 aa, Homo sapiens
QQDHFFQAAFLEER

SEQ ID NO: 4440 - protein, 7 aa, Homo sapiens
QQEELMK

SEQ ID NO: 4441 - protein, 11 aa, Homo sapiens
QQEQQQQQVAR

SEQ ID NO: 4442 - protein, 6 aa, Homo sapiens
QQLNLR

SEQ ID NO: 4443 - protein, 8 aa, Homo sapiens
QQLTGHSK

SEQ ID NO: 4444 - protein, 23 aa, Homo sapiens
QQNAQGGFSSTQDTVVALHALSK

SEQ ID NO: 4445 - protein, 31 aa, Homo sapiens
QQNAQGGFSSTQDTVVALHALSKYGAATFTR

SEQ ID NO: 4446 - protein, 23 aa, Homo sapiens
QQNAQGGFSSTQDTVVALHALSR

SEQ ID NO: 4447 - protein, 10 aa, Homo sapiens
QQTEWQSGQR

SEQ ID NO: 4448 - protein, 15 aa, Homo sapiens
QQTHMLDVMQDHFSR

SEQ ID NO: 4449 - protein, 26 aa, Homo sapiens
QRPPDLDTSSNAVDLLFFTDESGDSR

SEQ ID NO: 4450 - protein, 10 aa, Homo sapiens
QRQEELCLAR

SEQ ID NO: 4451 - protein, 9 aa, Homo sapiens
QRVEASISK

SEQ ID NO: 4452 - protein, 12 aa, Homo sapiens
QSEDSTFYLGER

SEQ ID NO: 4453 - protein, 7 aa, Homo sapiens
QSELSAK

SEQ ID NO: 4454 - protein, 8 aa, Homo sapiens
QSFDLSVK

SEQ ID NO: 4455 - protein, 11 aa, Homo sapiens
QSGLYFIKPLK

SEQ ID NO: 4456 - protein, 8 aa, Homo sapiens
QSITDELK

SEQ ID NO: 4457 - protein, 9 aa, Homo sapiens
QSKPGEDLK

SEQ ID NO: 4458 - protein, 13 aa, Homo sapiens
QSLEASLAETEGR

SEQ ID NO: 4459 - protein, 14 aa, Homo sapiens
QSLGELIGTLNAAK

SEQ ID NO: 4460 - protein, 20 aa, Homo sapiens
QSLGHGQHGSGSGQSPSPSR

SEQ ID NO: 4461 - protein, 7 aa, Homo sapiens
QSSEITR

SEQ ID NO: 4462 - protein, 8 aa, Homo sapiens
QSSPDSVK

SEQ ID NO: 4463 - protein, 14 aa, Homo sapiens
QSSSYGPHGYGSGR

SEQ ID NO: 4464 - protein, 9 aa, Homo sapiens
QSSSYSFFK

SEQ ID NO: 4465 - protein, 18 aa, Homo sapiens
QSSSYSFFKEEIIYECDK

SEQ ID NO: 4466 - protein, 6 aa, Homo sapiens
QSTLDK

SEQ ID NO: 4467 - protein, 8 aa, Homo sapiens
QSTLDKEL

SEQ ID NO: 4468 - protein, 10 aa, Homo sapiens
QSTNAYPDLR

SEQ ID NO: 4469 - protein, 12 aa, Homo sapiens
QSVEADINGLRR

SEQ ID NO: 4470 - protein, 8 aa, Homo sapiens
QSVEHFTK

SEQ ID NO: 4471 - protein, 13 aa, Homo sapiens
QTACKPEIAYAYK

SEQ ID NO: 4472 - protein, 9 aa, Homo sapiens
QTALVELVK

SEQ ID NO: 4473 - protein, 9 aa, Homo sapiens
QTEATMTFK

SEQ ID NO: 4474 - protein, 13 aa, Homo sapiens
QTHQPPAPNSLIR

SEQ ID NO: 4475 - protein, 12 aa, Homo sapiens
QTIIVVLENVQR

SEQ ID NO: 4476 - protein, 15 aa, Homo sapiens
QTLENERGELANEVK

SEQ ID NO: 4477 - protein, 10 aa, Homo sapiens
QTLSWTVTPK

SEQ ID NO: 4478 - protein, 17 aa, Homo sapiens
QTQVSVLPEGGETPLFK

SEQ ID NO: 4479 - protein, 7 aa, Homo sapiens
QTVEAMK

SEQ ID NO: 4480 - protein, 21 aa, Homo sapiens
QTVNLQLQPYSLVTTLNSDLK

SEQ ID NO: 4481 - protein, 10 aa, Homo sapiens
QTVSWAVTPK

SEQ ID NO: 4482 - protein, 9 aa, Homo sapiens
QVEGMEDWK

SEQ ID NO: 4483 - protein, 16 aa, Homo sapiens
QVEGMEDWKQDSQLQK

SEQ ID NO: 4484 - protein, 18 aa, Homo sapiens
QVFLYPEKDEPTYILNIK

SEQ ID NO: 4485 - protein, 18 aa, Homo sapiens
QVKDNENVVNEYSSELEK

SEQ ID NO: 4486 - protein, 15 aa, Homo sapiens
QVLLVGAPTYDDVSK

SEQ ID NO: 4487 - protein, 8 aa, Homo sapiens
QVNEPHIR

SEQ ID NO: 4488 - protein, 14 aa, Homo sapiens
QVRPIVGPFHAVLK

SEQ ID NO: 4489 - protein, 9 aa, Homo sapiens
QVSGPLTSK

SEQ ID NO: 4490 - protein, 10 aa, Homo sapiens
QVTPLFIHFR

SEQ ID NO: 4491 - protein, 9 aa, Homo sapiens
QVVAGLNFR

SEQ ID NO: 4492 - protein, 11 aa, Homo sapiens
QVVESAYEVIK

SEQ ID NO: 4493 - protein, 8 aa, Homo sapiens
QWAGLVEK

SEQ ID NO: 4494 - protein, 5 aa, Homo sapiens
QWINK

SEQ ID NO: 4495 - protein, 5 aa, Homo sapiens
QWLNK

SEQ ID NO: 4496 - protein, 7 aa, Homo sapiens
QYADTVK

SEQ ID NO: 4497 - protein, 6 aa, Homo sapiens
QYGFCK

SEQ ID NO: 4498 - protein, 7 aa, Homo sapiens
QYLIMGK

SEQ ID NO: 4499 - protein, 10 aa, Homo sapiens
QYNVGPSVSK

SEQ ID NO: 4500 - protein, 14 aa, Homo sapiens
QYNVGPSVSKYPLR

SEQ ID NO: 4501 - protein, 9 aa, Homo sapiens
QYRNGESVK

SEQ ID NO: 4502 - protein, 6 aa, Homo sapiens
QYSLFK

SEQ ID NO: 4503 - protein, 8 aa, Homo sapiens
QYTDSTFR

SEQ ID NO: 4504 - protein, 13 aa, Homo sapiens
QYTDSTFRVPVER

SEQ ID NO: 4505 - protein, 33 aa, Homo sapiens
QYWEYQFQHQPSQEECEGSSLSAVFEHFAMMQR

SEQ ID NO: 4506 - protein, 13 aa, Homo sapiens
QYYEGSEIVVAGR

SEQ ID NO: 4507 - protein, 13 aa, Homo sapiens
RAPDLQDLPWQVK

SEQ ID NO: 4508 - protein, 13 aa, Homo sapiens
RAPSTWLTAYVVK

SEQ ID NO: 4509 - protein, 13 aa, Homo sapiens
RAPWCHTTNSQVR

SEQ ID NO: 4510 - protein, 9 aa, Homo sapiens
RAPYPNYDR

SEQ ID NO: 4511 - protein, 14 aa, Homo sapiens
RAQLGDLPWQVAIK

SEQ ID NO: 4512 - protein, 8 aa, Homo sapiens
RATEEISK

SEQ ID NO: 4513 - protein, 20 aa, Homo sapiens
RATTVTGTPCQDWAAQEPHR

SEQ ID NO: 4514 - protein, 9 aa, Homo sapiens
RDFTFDLYR

SEQ ID NO: 4515 - protein, 10 aa, Homo sapiens
RDGYLFQLLR

SEQ ID NO: 4516 - protein, 19 aa, Homo sapiens
RDLEIEVVLFHPNYNINGK

SEQ ID NO: 4517 - protein, 14 aa, Homo sapiens
RDPSPVSGPVHLFR

SEQ ID NO: 4518 - protein, 7 aa, Homo sapiens
RDSWLDK

SEQ ID NO: 4519 - protein, 39 aa, Homo sapiens
RDTANLFPQTSLTLHMWPDTEGTFNVECLTTDHYTGGMK

SEQ ID NO: 4520 - protein, 13 aa, Homo sapiens
RDTMVEDLVVLVR

SEQ ID NO: 4521 - protein, 26 aa, Homo sapiens
REDFDVEAADSAGNCLDSLVFVAGDR

SEQ ID NO: 4522 - protein, 10 aa, Homo sapiens
REDGSVNFFR

SEQ ID NO: 4523 - protein, 20 aa, Homo sapiens
REEAPSLRPAPPPISGGGYR

SEQ ID NO: 4524 - protein, 13 aa, Homo sapiens
REEFWLGLDNLNK

SEQ ID NO: 4525 - protein, 12 aa, Homo sapiens
RELDESLQVAER

SEQ ID NO: 4526 - protein, 6 aa, Homo sapiens
RELLMK

SEQ ID NO: 4527 - protein, 18 aa, Homo sapiens
REPAVGEPAEVTTTVLVR

SEQ ID NO: 4528 - protein, 9 aa, Homo sapiens
REQPPSLTR

SEQ ID NO: 4529 - protein, 16 aa, Homo sapiens
RFDEILEASDGIMVAR

SEQ ID NO: 4530 - protein, 17 aa, Homo sapiens
RFEQLELRPVLYNYLDK

SEQ ID NO: 4531 - protein, 9 aa, Homo sapiens
RFNALQYLR

SEQ ID NO: 4532 - protein, 9 aa, Homo sapiens
RFTVETPDK

SEQ ID NO: 4533 - protein, 16 aa, Homo sapiens
RGDACEGDSGGPFVMK

SEQ ID NO: 4534 - protein, 10 aa, Homo sapiens
RGDLPFVVPR

SEQ ID NO: 4535 - protein, 14 aa, Homo sapiens
RGDSPWQVVLLDSK

SEQ ID NO: 4536 - protein, 26 aa, Homo sapiens
RGENLFAITDEGMDVPLAMEEWHHER

SEQ ID NO: 4537 - protein, 11 aa, Homo sapiens
RGETESEEFEK

SEQ ID NO: 4538 - protein, 18 aa, Homo sapiens
RGHLFLQTDQPIYNPGQR

SEQ ID NO: 4539 - protein, 17 aa, Homo sapiens
RGIISALLVPPETEEAK

SEQ ID NO: 4540 - protein, 7 aa, Homo sapiens
RGILTLK

SEQ ID NO: 4541 - protein, 22 aa, Homo sapiens
RGLESNVNVELLNALHSHMINK

SEQ ID NO: 4542 - protein, 12 aa, Homo sapiens
RGLQVALEEFHK

SEQ ID NO: 4543 - protein, 16 aa, Homo sapiens
RGPGGAWAAEVISDAR

SEQ ID NO: 4544 - protein, 16 aa, Homo sapiens
RGPGGAWAAEVISNAR

SEQ ID NO: 4545 - protein, 7 aa, Homo sapiens
RGSFDYK

SEQ ID NO: 4546 - protein, 9 aa, Homo sapiens
RHLTGEFEK

SEQ ID NO: 4547 - protein, 16 aa, Homo sapiens
RHLVPGAPFLLQALVR

SEQ ID NO: 4548 - protein, 12 aa, Homo sapiens
RHPDLSIPELLR

SEQ ID NO: 4549 - protein, 12 aa, Homo sapiens
RHPDYSVVLLLR

SEQ ID NO: 4550 - protein, 15 aa, Homo sapiens
RHPYFYAPELLFFAK

SEQ ID NO: 4551 - protein, 10 aa, Homo sapiens
RIDITLSSVK

SEQ ID NO: 4552 - protein, 11 aa, Homo sapiens
RIEDIHLLVER

SEQ ID NO: 4553 - protein, 8 aa, Homo sapiens
RIESLIDR

SEQ ID NO: 4554 - protein, 17 aa, Homo sapiens
RIFSPFADLSELSATGR

SEQ ID NO: 4555 - protein, 45 aa, Homo sapiens
RIHEDSDSALQLQDFYQEVANPLLTAVTFEYPSNAVEEVTQNNFR

SEQ ID NO: 4556 - protein, 9 aa, Homo sapiens
RILPLTVCK

SEQ ID NO: 4557 - protein, 5 aa, Homo sapiens
RILYK

SEQ ID NO: 4558 - protein, 15 aa, Homo sapiens
RIPIEDGSGEVVLSR

SEQ ID NO: 4559 - protein, 13 aa, Homo sapiens
RIPLYYPNAGLTR

SEQ ID NO: 4560 - protein, 11 aa, Homo sapiens
RIQLVEEELDR

SEQ ID NO: 4561 - protein, 9 aa, Homo sapiens
RIVIEYVDR

SEQ ID NO: 4562 - protein, 7 aa, Homo sapiens
RIYGGFK

SEQ ID NO: 4563 - protein, 23 aa, Homo sapiens
RKPVEGYDISFLITNFHTEQMYK

SEQ ID NO: 4564 - protein, 9 aa, Homo sapiens
RLDGSVDFK

SEQ ID NO: 4565 - protein, 9 aa, Homo sapiens
RLEVDIDIK

SEQ ID NO: 4566 - protein, 10 aa, Homo sapiens
RLFQPLTHLK

SEQ ID NO: 4567 - protein, 11 aa, Homo sapiens
RLGMFNIQHCK

SEQ ID NO: 4568 - protein, 10 aa, Homo sapiens
RLGVYELLLK

SEQ ID NO: 4569 - protein, 21 aa, Homo sapiens
RLIDQYGTHYLQSGSLGGEYR

SEQ ID NO: 4570 - protein, 13 aa, Homo sapiens
RLMQCLPNPEDVK

SEQ ID NO: 4571 - protein, 11 aa, Homo sapiens
RLMVELHNLYR

SEQ ID NO: 4572 - protein, 5 aa, Homo sapiens
RLMVK

SEQ ID NO: 4573 - protein, 8 aa, Homo sapiens
RLPDTGSK

SEQ ID NO: 4574 - protein, 24 aa, Homo sapiens
RLPGDIQVVPIGVGPNANVQELER

SEQ ID NO: 4575 - protein, 8 aa, Homo sapiens
RLPIGSYF

SEQ ID NO: 4576 - protein, 12 aa, Homo sapiens
RLPLEYSYGEYR

SEQ ID NO: 4577 - protein, 10 aa, Homo sapiens
RLQAAGNAVK

SEQ ID NO: 4578 - protein, 8 aa, Homo sapiens
RLQEALER

SEQ ID NO: 4579 - protein, 10 aa, Homo sapiens
RLSEDYGVLK

SEQ ID NO: 4580 - protein, 12 aa, Homo sapiens
RLSNENHGIAQR

SEQ ID NO: 4581 - protein, 19 aa, Homo sapiens
RLTVGAAQVPAQLLVGALR

SEQ ID NO: 4582 - protein, 10 aa, Homo sapiens
RLVNIAVDER

SEQ ID NO: 4583 - protein, 8 aa, Homo sapiens
RLWWLDLK

SEQ ID NO: 4584 - protein, 7 aa, Homo sapiens
RLYDVLR

SEQ ID NO: 4585 - protein, 19 aa, Homo sapiens
RLYGSEAFATDFQDSAAAK

SEQ ID NO: 4586 - protein, 27 aa, Homo sapiens
RMPITYDNGFLFIHTDKPVYTPDQSVK

SEQ ID NO: 4587 - protein, 9 aa, Homo sapiens
RMVVPAALK

SEQ ID NO: 4588 - protein, 14 aa, Homo sapiens
RNDYLDIYAIGVGK

SEQ ID NO: 4589 - protein, 8 aa, Homo sapiens
RNFGYTLR

SEQ ID NO: 4590 - protein, 11 aa, Homo sapiens
RNHMQYEIVIK

SEQ ID NO: 4591 - protein, 22 aa, Homo sapiens
RNPFVFAPTLLTVAVHFEEVAK

SEQ ID NO: 4592 - protein, 29 aa, Homo sapiens
RNPPMGGNVVIFDTVITNQEEPYQNHSGR

SEQ ID NO: 4593 - protein, 5 aa, Homo sapiens
RNSVR

SEQ ID NO: 4594 - protein, 24 aa, Homo sapiens
RNTEILTGSWSDQTYPEGTQAIYK

SEQ ID NO: 4595 - protein, 16 aa, Homo sapiens
RPALNYPVYGETTQVR

SEQ ID NO: 4596 - protein, 12 aa, Homo sapiens
RPASPISTIQPK

SEQ ID NO: 4597 - protein, 8 aa, Homo sapiens
RPCFESLK

SEQ ID NO: 4598 - protein, 16 aa, Homo sapiens
RPCFSALEVDETYVPK

SEQ ID NO: 4599 - protein, 27 aa, Homo sapiens
RPCGHPGDTPFGTFTLTGGNVFEYGVK

SEQ ID NO: 4600 - protein, 15 aa, Homo sapiens
RPDSLQHVLLPVLDR

SEQ ID NO: 4601 - protein, 10 aa, Homo sapiens
RPFLSIISAR

SEQ ID NO: 4602 - protein, 7 aa, Homo sapiens
RPGEIVK

SEQ ID NO: 4603 - protein, 22 aa, Homo sapiens
RPGGEPSPEGTTGQSYNQYSQR

SEQ ID NO: 4604 - protein, 10 aa, Homo sapiens
RPGVYTQVTK

SEQ ID NO: 4605 - protein, 8 aa, Homo sapiens
RPHFFFPK

SEQ ID NO: 4606 - protein, 34 aa, Homo sapiens
RPLEQQQPHHIPTSAPVYQQPQQQPVAQSYGGYK

SEQ ID NO: 4607 - protein, 9 aa, Homo sapiens
RPPGFSPFR

SEQ ID NO: 4608 - protein, 13 aa, Homo sapiens
RPPLCYHNGVQYR

SEQ ID NO: 4609 - protein, 16 aa, Homo sapiens
RPQDAKNTMILEICTR

SEQ ID NO: 4610 - protein, 6 aa, Homo sapiens
RPQYIK

SEQ ID NO: 4611 - protein, 28 aa, Homo sapiens
RPSCDIDKPPPNIELTGNGYNELTGQFR

SEQ ID NO: 4612 - protein, 11 aa, Homo sapiens
RPSEIVIGQCK

SEQ ID NO: 4613 - protein, 15 aa, Homo sapiens
RPSSQGWASPQVAGR

SEQ ID NO: 4614 - protein, 10 aa, Homo sapiens
RPTLTTFFGR

SEQ ID NO: 4615 - protein, 26 aa, Homo sapiens
RPVPISYHQLEAFYSIFTTEQQDHVK

SEQ ID NO: 4616 - protein, 13 aa, Homo sapiens
RPWNVASLIYETK

SEQ ID NO: 4617 - protein, 10 aa, Homo sapiens
RPYFPVAVGK

SEQ ID NO: 4618 - protein, 5 aa, Homo sapiens
RPYLK

SEQ ID NO: 4619 - protein, 14 aa, Homo sapiens
RQAVDTAVDGVFIR

SEQ ID NO: 4620 - protein, 10 aa, Homo sapiens
RQDGSVDFFR

SEQ ID NO: 4621 - protein, 12 aa, Homo sapiens
RQDNEILIFWSK

SEQ ID NO: 4622 - protein, 9 aa, Homo sapiens
RQGALELIK

SEQ ID NO: 4623 - protein, 12 aa, Homo sapiens
RQLEEAEEEAQR

SEQ ID NO: 4624 - protein, 9 aa, Homo sapiens
RQLTPYAQR

SEQ ID NO: 4625 - protein, 26 aa, Homo sapiens
RQNGAALTSASILAQQVWGTLVLLQR

SEQ ID NO: 4626 - protein, 12 aa, Homo sapiens
RQQPGPSEHIER

SEQ ID NO: 4627 - protein, 13 aa, Homo sapiens
RQSEDSTFYLGER

SEQ ID NO: 4628 - protein, 12 aa, Homo sapiens
RSENINHNSAFK

SEQ ID NO: 4629 - protein, 13 aa, Homo sapiens
RSFLLDLLNATGK

SEQ ID NO: 4630 - protein, 9 aa, Homo sapiens
RTDEAAFQK

SEQ ID NO: 4631 - protein, 21 aa, Homo sapiens
RTFVLSALQPSPTHSSSNTQR

SEQ ID NO: 4632 - protein, 11 aa, Homo sapiens
RTHLPEVFLSK

SEQ ID NO: 4633 - protein, 36 aa, Homo sapiens
RTLTSVSVFVDHHLAPSFYFVAFYYHGDHPVANSLR

SEQ ID NO: 4634 - protein, 12 aa, Homo sapiens
RTNAENEFVTIK

SEQ ID NO: 4635 - protein, 6 aa, Homo sapiens
RTPHEK

SEQ ID NO: 4636 - protein, 8 aa, Homo sapiens
RTPITVVK

SEQ ID NO: 4637 - protein, 7 aa, Homo sapiens
RTTVMVK

SEQ ID NO: 4638 - protein, 14 aa, Homo sapiens
RVAEGTQVLELPFK

SEQ ID NO: 4639 - protein, 17 aa, Homo sapiens
RVAGSVTELIQAAEAMK

SEQ ID NO: 4640 - protein, 9 aa, Homo sapiens
RVDADADPR

SEQ ID NO: 4641 - protein, 10 aa, Homo sapiens
RVDGSVDFYR

SEQ ID NO: 4642 - protein, 11 aa, Homo sapiens
RVDTVDPPYPR

SEQ ID NO: 4643 - protein, 16 aa, Homo sapiens
RVEDLHVGATVAPSSR

SEQ ID NO: 4644 - protein, 11 aa, Homo sapiens
RVEPYGENFNK

SEQ ID NO: 4645 - protein, 28 aa, Homo sapiens
RVHANPLLIDVVTYLVALIPEPSAQQLR

SEQ ID NO: 4646 - protein, 22 aa, Homo sapiens
RVIISAPSADAPMFVMGVNHEK

SEQ ID NO: 4647 - protein, 31 aa, Homo sapiens
RVINLPLDSMAAPWETGDTFPDVVAIAPDVR

SEQ ID NO: 4648 - protein, 6 aa, Homo sapiens
RVLFAK

SEQ ID NO: 4649 - protein, 8 aa, Homo sapiens
RVPFSLLR

SEQ ID NO: 4650 - protein, 13 aa, Homo sapiens
RVQLYDLGLQIHK

SEQ ID NO: 4651 - protein, 9 aa, Homo sapiens
RVSLATVDK

SEQ ID NO: 4652 - protein, 11 aa, Homo sapiens
RVSYVGLVTVR

SEQ ID NO: 4653 - protein, 7 aa, Homo sapiens
RVWELSK

SEQ ID NO: 4654 - protein, 8 aa, Homo sapiens
RVWNYFQR

SEQ ID NO: 4655 - protein, 9 aa, Homo sapiens
RWELCDIPR

SEQ ID NO: 4656 - protein, 9 aa, Homo sapiens
RYDLSALVR

SEQ ID NO: 4657 - protein, 10 aa, Homo sapiens
RYIETDPANR

SEQ ID NO: 4658 - protein, 17 aa, Homo sapiens
RYSAWAESVTNLPQVIK

SEQ ID NO: 4659 - protein, 23 aa, Homo sapiens
RYTIAALLSPYSYSTTAVVTNPK

SEQ ID NO: 4660 - protein, 15 aa, Homo sapiens
RYTLNILEEIGGGQK

SEQ ID NO: 4661 - protein, 9 aa, Homo sapiens
SAATLQQEK

SEQ ID NO: 4662 - protein, 10 aa, Homo sapiens
SADFTNFDPR

SEQ ID NO: 4663 - protein, 13 aa, Homo sapiens
SAEAPQSPAVYAR

SEQ ID NO: 4664 - protein, 6 aa, Homo sapiens
SAGLVK

SEQ ID NO: 4665 - protein, 10 aa, Homo sapiens
SAGLVKATGR

SEQ ID NO: 4666 - protein, 15 aa, Homo sapiens
SAGSVESPSVSSTHR

SEQ ID NO: 4667 - protein, 15 aa, Homo sapiens
SAKPGQEEDGPLKGK

SEQ ID NO: 4668 - protein, 20 aa, Homo sapiens
SAKPTKPAASDLPVPAEGVR

SEQ ID NO: 4669 - protein, 18 aa, Homo sapiens
SALFAQINQGESITHALK

SEQ ID NO: 4670 - protein, 9 aa, Homo sapiens
SALTWHQAR

SEQ ID NO: 4671 - protein, 9 aa, Homo sapiens
SALVLQYLR

SEQ ID NO: 4672 - protein, 11 aa, Homo sapiens
SASDLTWDNLK

SEQ ID NO: 4673 - protein, 8 aa, Homo sapiens
SASLHLPK

SEQ ID NO: 4674 - protein, 11 aa, Homo sapiens
SASNMAIVDVK

SEQ ID NO: 4675 - protein, 24 aa, Homo sapiens
SASNMAIVDVKMVSGFIPLKPTVK

SEQ ID NO: 4676 - protein, 10 aa, Homo sapiens
SAVDAGFLQK

SEQ ID NO: 4677 - protein, 9 aa, Homo sapiens
SAVTALWGK

SEQ ID NO: 4678 - protein, 12 aa, Homo sapiens
SCAVAEYGVYVK

SEQ ID NO: 4679 - protein, 11 aa, Homo sapiens
SCDIPVFMNAR

SEQ ID NO: 4680 - protein, 5 aa, Homo sapiens
SCEYK

SEQ ID NO: 4681 - protein, 9 aa, Homo sapiens
SCGLHQLLR

SEQ ID NO: 4682 - protein, 8 aa, Homo sapiens
SCHTAVGR

SEQ ID NO: 4683 - protein, 10 aa, Homo sapiens
SDDKVTLEER

SEQ ID NO: 4684 - protein, 41 aa, Homo sapiens
SDEHVVSGNLVTPLPVILGHEAAGIVESVGEGVTTVKPGDK

SEQ ID NO: 4685 - protein, 11 aa, Homo sapiens
SDENEQHLGVK

SEQ ID NO: 4686 - protein, 8 aa, Homo sapiens
SDFSNEER

SEQ ID NO: 4687 - protein, 8 aa, Homo sapiens
SDIAPVAR

SEQ ID NO: 4688 - protein, 21 aa, Homo sapiens
SDIEIENGFISESSSIYILNK

SEQ ID NO: 4689 - protein, 13 aa, Homo sapiens
SDLAVPSELALLK

SEQ ID NO: 4690 - protein, 19 aa, Homo sapiens
SDLEMQYETLQEELMALKK

SEQ ID NO: 4691 - protein, 9 aa, Homo sapiens
SDLEVAHYK

SEQ ID NO: 4692 - protein, 13 aa, Homo sapiens
SDLEVAHYKLKPR

SEQ ID NO: 4693 - protein, 19 aa, Homo sapiens
SDNCEDTPEAGYFAVAVVK

SEQ ID NO: 4694 - protein, 20 aa, Homo sapiens
SDNCEDTPEAGYFAVAVVKK

SEQ ID NO: 4695 - protein, 8 aa, Homo sapiens
SDSLSPPR

SEQ ID NO: 4696 - protein, 8 aa, Homo sapiens
SDTVPSPR

SEQ ID NO: 4697 - protein, 17 aa, Homo sapiens
SDVGFLPPFPTLDPEEK

SEQ ID NO: 4698 - protein, 9 aa, Homo sapiens
SDVMYTDWK

SEQ ID NO: 4699 - protein, 10 aa, Homo sapiens
SDVMYTDWKK

SEQ ID NO: 4700 - protein, 9 aa, Homo sapiens
SDVVYTDWK

SEQ ID NO: 4701 - protein, 10 aa, Homo sapiens
SDVVYTDWKK

SEQ ID NO: 4702 - protein, 23 aa, Homo sapiens
SEALAVDGAGKPGAEEAQDPEGK

SEQ ID NO: 4703 - protein, 10 aa, Homo sapiens
SEAYNTFSER

SEQ ID NO: 4704 - protein, 34 aa, Homo sapiens
SEDAGGAEGETPHMLLRPHVFMPEVTPDMDYLPR

SEQ ID NO: 4705 - protein, 11 aa, Homo sapiens
SEDCFILDHGK

SEQ ID NO: 4706 - protein, 25 aa, Homo sapiens
SEEENLFEIITADEVHYFLQAATPK

SEQ ID NO: 4707 - protein, 9 aa, Homo sapiens
SEEFLIAGK

SEQ ID NO: 4708 - protein, 15 aa, Homo sapiens
SEFPESWLWNVEDLK

SEQ ID NO: 4709 - protein, 19 aa, Homo sapiens
SEFPESWLWNVEDLKEPPK

SEQ ID NO: 4710 - protein, 5 aa, Homo sapiens
SEFYK

SEQ ID NO: 4711 - protein, 26 aa, Homo sapiens
SEGSSVNLSPPLEQCVPDRGQQYQGR

SEQ ID NO: 4712 - protein, 7 aa, Homo sapiens
SEIDNVK

SEQ ID NO: 4713 - protein, 8 aa, Homo sapiens
SEIDNVKK

SEQ ID NO: 4714 - protein, 11 aa, Homo sapiens
SEILAHWSPAK

SEQ ID NO: 4715 - protein, 5 aa, Homo sapiens
SEILK

SEQ ID NO: 4716 - protein, 8 aa, Homo sapiens
SEISELRR

SEQ ID NO: 4717 - protein, 7 aa, Homo sapiens
SEITELR

SEQ ID NO: 4718 - protein, 8 aa, Homo sapiens
SEITELRR

SEQ ID NO: 4719 - protein, 5 aa, Homo sapiens
SELIK

SEQ ID NO: 4720 - protein, 5 aa, Homo sapiens
SELLK

SEQ ID NO: 4721 - protein, 14 aa, Homo sapiens
SELTQQLNALFQDK

SEQ ID NO: 4722 - protein, 11 aa, Homo sapiens
SENINHNSAFK

SEQ ID NO: 4723 - protein, 12 aa, Homo sapiens
SENLHVSHILQK

SEQ ID NO: 4724 - protein, 13 aa, Homo sapiens
SEPIPESNDGPVK

SEQ ID NO: 4725 - protein, 7 aa, Homo sapiens
SEPLIGR

SEQ ID NO: 4726 - protein, 18 aa, Homo sapiens
SETEIHQGFQHLHQLFAK

SEQ ID NO: 4727 - protein, 13 aa, Homo sapiens
SEVEVDIHYCQGK

SEQ ID NO: 4728 - protein, 8 aa, Homo sapiens
SEVYGPMK

SEQ ID NO: 4729 - protein, 11 aa, Homo sapiens
SEYGAALAWEK

SEQ ID NO: 4730 - protein, 9 aa, Homo sapiens
SEYMEGNVR

SEQ ID NO: 4731 - protein, 11 aa, Homo sapiens
SEYQADYESLR

SEQ ID NO: 4732 - protein, 14 aa, Homo sapiens
SFDYHQFVDETNDK

SEQ ID NO: 4733 - protein, 16 aa, Homo sapiens
SFDYHQFVDETNDKIR

SEQ ID NO: 4734 - protein, 22 aa, Homo sapiens
SFEGLGQLEVLTLDHNQLQEVK

SEQ ID NO: 4735 - protein, 5 aa, Homo sapiens
SFEYK

SEQ ID NO: 4736 - protein, 10 aa, Homo sapiens
SFFPENWLWR

SEQ ID NO: 4737 - protein, 21 aa, Homo sapiens
SFGMTPVLPAFAGHVPEAVTR

SEQ ID NO: 4738 - protein, 8 aa, Homo sapiens
SFLEDIRK

SEQ ID NO: 4739 - protein, 13 aa, Homo sapiens
SFMHVNTNANFYK

SEQ ID NO: 4740 - protein, 9 aa, Homo sapiens
SFMLLILER

SEQ ID NO: 4741 - protein, 9 aa, Homo sapiens
SFNPNSPGK

SEQ ID NO: 4742 - protein, 9 aa, Homo sapiens
SFPTYCQQK

SEQ ID NO: 4743 - protein, 11 aa, Homo sapiens
SFQTGLFTAAR

SEQ ID NO: 4744 - protein, 8 aa, Homo sapiens
SFRPFVPR

SEQ ID NO: 4745 - protein, 13 aa, Homo sapiens
SFSIIGDFQNGKR

SEQ ID NO: 4746 - protein, 10 aa, Homo sapiens
SFTIKPVGFK

SEQ ID NO: 4747 - protein, 35 aa, Homo sapiens
SFVHLEPMSHELPCGHTQTVQAHYILNGGTLLGLK

SEQ ID NO: 4748 - protein, 36 aa, Homo sapiens
SFVHLEPMSHELPCGHTQTVQAHYILNGGTLLGLKK

SEQ ID NO: 4749 - protein, 15 aa, Homo sapiens
SFYANNHCIGTDLNR

SEQ ID NO: 4750 - protein, 23 aa, Homo sapiens
SGAGTEDSACIPWAYYSTVDQVK

SEQ ID NO: 4751 - protein, 16 aa, Homo sapiens
SGAQATWTELPWPHEK

SEQ ID NO: 4752 - protein, 25 aa, Homo sapiens
SGAQATWTELPWPHEKVDGALCMEK

SEQ ID NO: 4753 - protein, 22 aa, Homo sapiens
SGDRGETGPAGPAGPVGPVGAR

SEQ ID NO: 4754 - protein, 16 aa, Homo sapiens
SGFPQVSMFFTHTFPK

SEQ ID NO: 4755 - protein, 8 aa, Homo sapiens
SGFSFGFK

SEQ ID NO: 4756 - protein, 14 aa, Homo sapiens
SGGASHSELIHNLR

SEQ ID NO: 4757 - protein, 16 aa, Homo sapiens
SGGGGGGGLGSGGSIR

SEQ ID NO: 4758 - protein, 9 aa, Homo sapiens
SGIECQLWR

SEQ ID NO: 4759 - protein, 16 aa, Homo sapiens
SGIPIVTSPYQIHFTK

SEQ ID NO: 4760 - protein, 9 aa, Homo sapiens
SGKPAELLK

SEQ ID NO: 4761 - protein, 9 aa, Homo sapiens
SGKYDLDFK

SEQ ID NO: 4762 - protein, 12 aa, Homo sapiens
SGLSTGWTQLSK

SEQ ID NO: 4763 - protein, 11 aa, Homo sapiens
SGNENGEFYLR

SEQ ID NO: 4764 - protein, 7 aa, Homo sapiens
SGNMLGR

SEQ ID NO: 4765 - protein, 18 aa, Homo sapiens
SGQSEDRQPVPGQQMTLK

SEQ ID NO: 4766 - protein, 25 aa, Homo sapiens
SGQSSYGQHSSGSSQSSGYGQHGSR

SEQ ID NO: 4767 - protein, 12 aa, Homo sapiens
SGSDEVQVGQQR

SEQ ID NO: 4768 - protein, 15 aa, Homo sapiens
SGSSTASWIQNVDTK

SEQ ID NO: 4769 - protein, 14 aa, Homo sapiens
SGTHTLPVESGDMK

SEQ ID NO: 4770 - protein, 13 aa, Homo sapiens
SGTLYSLTLYGLR

SEQ ID NO: 4771 - protein, 9 aa, Homo sapiens
SGTSEFLNK

SEQ ID NO: 4772 - protein, 22 aa, Homo sapiens
SGVQMNTNFFHESGLEAHVALK

SEQ ID NO: 4773 - protein, 14 aa, Homo sapiens
SGVQQLIQYYQDQK

SEQ ID NO: 4774 - protein, 18 aa, Homo sapiens
SGVYQHVTGEMMGGHAIR

SEQ ID NO: 4775 - protein, 20 aa, Homo sapiens
SGWAIDPFGHSPTMAYLLNR

SEQ ID NO: 4776 - protein, 15 aa, Homo sapiens
SGYLLHGSNEITCNR

SEQ ID NO: 4777 - protein, 9 aa, Homo sapiens
SHALQLNNR

SEQ ID NO: 4778 - protein, 27 aa, Homo sapiens
SHCIAEVENDEMPADLPSLAADFVESK

SEQ ID NO: 4779 - protein, 18 aa, Homo sapiens
SHEFHAINGMIYSLPGLK

SEQ ID NO: 4780 - protein, 9 aa, Homo sapiens
SHKPLNMGK

SEQ ID NO: 4781 - protein, 10 aa, Homo sapiens
SHLIIAQVAK

SEQ ID NO: 4782 - protein, 12 aa, Homo sapiens
SHSAHFFEFLTK

SEQ ID NO: 4783 - protein, 11 aa, Homo sapiens
SIAAATSALVK

SEQ ID NO: 4784 - protein, 15 aa, Homo sapiens
SIAQYWLGCPAPGHL

SEQ ID NO: 4785 - protein, 8 aa, Homo sapiens
SIDDLEEK

SEQ ID NO: 4786 - protein, 14 aa, Homo sapiens
SIDVACHPGYALPK

SEQ ID NO: 4787 - protein, 7 aa, Homo sapiens
SIEEVLR

SEQ ID NO: 4788 - protein, 6 aa, Homo sapiens
SIEHLK

SEQ ID NO: 4789 - protein, 11 aa, Homo sapiens
SIEVFGQFNGK

SEQ ID NO: 4790 - protein, 12 aa, Homo sapiens
SIEVFGQFNGKR

SEQ ID NO: 4791 - protein, 5 aa, Homo sapiens
SIEVK

SEQ ID NO: 4792 - protein, 8 aa, Homo sapiens
SIGDLDLK

SEQ ID NO: 4793 - protein, 6 aa, Homo sapiens
SIIQEK

SEQ ID NO: 4794 - protein, 5 aa, Homo sapiens
SILDK

SEQ ID NO: 4795 - protein, 7 aa, Homo sapiens
SILENLR

SEQ ID NO: 4796 - protein, 7 aa, Homo sapiens
SILFLGK

SEQ ID NO: 4797 - protein, 5 aa, Homo sapiens
SILPK

SEQ ID NO: 4798 - protein, 6 aa, Homo sapiens
SILQEK

SEQ ID NO: 4799 - protein, 28 aa, Homo sapiens
SILQMSLDHHIVTPLTSLVIENEAGDER

SEQ ID NO: 4800 - protein, 9 aa, Homo sapiens
SIPQVSPVR

SEQ ID NO: 4801 - protein, 10 aa, Homo sapiens
SIPQVSPVRR

SEQ ID NO: 4802 - protein, 7 aa, Homo sapiens
SIQNNVR

SEQ ID NO: 4803 - protein, 10 aa, Homo sapiens
SIRPGLSPYR

SEQ ID NO: 4804 - protein, 9 aa, Homo sapiens
SISAALEHK

SEQ ID NO: 4805 - protein, 8 aa, Homo sapiens
SISISVAR

SEQ ID NO: 4806 - protein, 6 aa, Homo sapiens
SISLIR

SEQ ID NO: 4807 - protein, 6 aa, Homo sapiens
SISLLR

SEQ ID NO: 4808 - protein, 7 aa, Homo sapiens
SISLPYR

SEQ ID NO: 4809 - protein, 10 aa, Homo sapiens
SITLFVQEDR

SEQ ID NO: 4810 - protein, 5 aa, Homo sapiens
SIVEK

SEQ ID NO: 4811 - protein, 8 aa, Homo sapiens
SIVNYKPK

SEQ ID NO: 4812 - protein, 12 aa, Homo sapiens
SIVPQGGSHSLR

SEQ ID NO: 4813 - protein, 7 aa, Homo sapiens
SIVSALK

SEQ ID NO: 4814 - protein, 8 aa, Homo sapiens
SIVSALKR

SEQ ID NO: 4815 - protein, 6 aa, Homo sapiens
SIYGEK

SEQ ID NO: 4816 - protein, 15 aa, Homo sapiens
SIYGEKFEDENFILK

SEQ ID NO: 4817 - protein, 10 aa, Homo sapiens
SIYKPGQTVK

SEQ ID NO: 4818 - protein, 12 aa, Homo sapiens
SKAEAESLYQSK

SEQ ID NO: 4819 - protein, 13 aa, Homo sapiens
SKAIGYLNTGYQR

SEQ ID NO: 4820 - protein, 16 aa, Homo sapiens
SKDHEELSLVASEAVR

SEQ ID NO: 4821 - protein, 12 aa, Homo sapiens
SKEEAEALYHSK

SEQ ID NO: 4822 - protein, 14 aa, Homo sapiens
SKEESHEQSAEQGK

SEQ ID NO: 4823 - protein, 11 aa, Homo sapiens
SKEFMEEVIQR

SEQ ID NO: 4824 - protein, 13 aa, Homo sapiens
SKEFQLFSSPHGK

SEQ ID NO: 4825 - protein, 19 aa, Homo sapiens
SKELTTEIDNNIEQISSYK

SEQ ID NO: 4826 - protein, 10 aa, Homo sapiens
SKEQLTPLIK

SEQ ID NO: 4827 - protein, 9 aa, Homo sapiens
SKFSPENTR

SEQ ID NO: 4828 - protein, 5 aa, Homo sapiens
SKIQK

SEQ ID NO: 4829 - protein, 17 aa, Homo sapiens
SKIYMADLESALHYILR

SEQ ID NO: 4830 - protein, 11 aa, Homo sapiens
SKLPGIVAEGR

SEQ ID NO: 4831 - protein, 5 aa, Homo sapiens
SKLQK

SEQ ID NO: 4832 - protein, 12 aa, Homo sapiens
SKPTVSSSMEFK

SEQ ID NO: 4833 - protein, 15 aa, Homo sapiens
SLADELALVDVLEDK

SEQ ID NO: 4834 - protein, 17 aa, Homo sapiens
SLAELGGHLDQQVEEFR

SEQ ID NO: 4835 - protein, 18 aa, Homo sapiens
SLAELGGHLDQQVEEFRR

SEQ ID NO: 4836 - protein, 22 aa, Homo sapiens
SLALGTFAHTPALASLGLSNNR

SEQ ID NO: 4837 - protein, 9 aa, Homo sapiens
SLAPTAAAK

SEQ ID NO: 4838 - protein, 10 aa, Homo sapiens
SLAPTAAAKR

SEQ ID NO: 4839 - protein, 12 aa, Homo sapiens
SLAPYAQDTQEK

SEQ ID NO: 4840 - protein, 9 aa, Homo sapiens
SLDEHYHIR

SEQ ID NO: 4841 - protein, 13 aa, Homo sapiens
SLDEISQPAQELK

SEQ ID NO: 4842 - protein, 13 aa, Homo sapiens
SLDFTELDVAAEK

SEQ ID NO: 4843 - protein, 16 aa, Homo sapiens
SLDFTELDVAAEKIDR

SEQ ID NO: 4844 - protein, 12 aa, Homo sapiens
SLDLDSIIAEVK

SEQ ID NO: 4845 - protein, 6 aa, Homo sapiens
SLDLSK

SEQ ID NO: 4846 - protein, 8 aa, Homo sapiens
SLEAASEK

SEQ ID NO: 4847 - protein, 10 aa, Homo sapiens
SLECLHPGTK

SEQ ID NO: 4848 - protein, 8 aa, Homo sapiens
SLEDKTER

SEQ ID NO: 4849 - protein, 11 aa, Homo sapiens
SLEDLQLTHNK

SEQ ID NO: 4850 - protein, 15 aa, Homo sapiens
SLEVTFTPVIEDIGK

SEQ ID NO: 4851 - protein, 14 aa, Homo sapiens
SLEYLDLSFNQIAR

SEQ ID NO: 4852 - protein, 22 aa, Homo sapiens
SLFTDLEAENDVLHCVAFAVPK

SEQ ID NO: 4853 - protein, 10 aa, Homo sapiens
SLFTDLVAEK

SEQ ID NO: 4854 - protein, 20 aa, Homo sapiens
SLFWENSHLLVNSFADNTRR

SEQ ID NO: 4855 - protein, 10 aa, Homo sapiens
SLGFCDTTNK

SEQ ID NO: 4856 - protein, 10 aa, Homo sapiens
SLGNVIMVCR

SEQ ID NO: 4857 - protein, 6 aa, Homo sapiens
SLGWLK

SEQ ID NO: 4858 - protein, 29 aa, Homo sapiens
SLHDPDGLVATYISEVHEHDGHLYLGSFR

SEQ ID NO: 4859 - protein, 8 aa, Homo sapiens
SLHMYANR

SEQ ID NO: 4860 - protein, 9 aa, Homo sapiens
SLHTLFGDK

SEQ ID NO: 4861 - protein, 17 aa, Homo sapiens
SLHTLFGDKLCTVATLR

SEQ ID NO: 4862 - protein, 7 aa, Homo sapiens
SLKVNCK

SEQ ID NO: 4863 - protein, 6 aa, Homo sapiens
SLLDGR

SEQ ID NO: 4864 - protein, 21 aa, Homo sapiens
SLLHGDFHAFSAGPGLFSYIR

SEQ ID NO: 4865 - protein, 6 aa, Homo sapiens
SLLHIK

SEQ ID NO: 4866 - protein, 6 aa, Homo sapiens
SLLHLK

SEQ ID NO: 4867 - protein, 12 aa, Homo sapiens
SLLHTLALPSPK

SEQ ID NO: 4868 - protein, 5 aa, Homo sapiens
SLLPK

SEQ ID NO: 4869 - protein, 7 aa, Homo sapiens
SLLQPNK

SEQ ID NO: 4870 - protein, 7 aa, Homo sapiens
SLLQRVR

SEQ ID NO: 4871 - protein, 25 aa, Homo sapiens
SLLSNVEGDNAVPMQHNNRPTQPLK

SEQ ID NO: 4872 - protein, 11 aa, Homo sapiens
SLMLHYEFLQR

SEQ ID NO: 4873 - protein, 18 aa, Homo sapiens
SLMLSYNAITHLPAGIFR

SEQ ID NO: 4874 - protein, 49 aa, Homo sapiens
SLMPFSPYEPLNFHAMFQPFLEMIHEAQQAMDIHFHSPAFQHPPTEFIR

SEQ ID NO: 4875 - protein, 8 aa, Homo sapiens
SLNEEAVK

SEQ ID NO: 4876 - protein, 9 aa, Homo sapiens
SLNEEAVKK

SEQ ID NO: 4877 - protein, 12 aa, Homo sapiens
SLNNQFASFIDK

SEQ ID NO: 4878 - protein, 14 aa, Homo sapiens
SLNNQFASFIDKVR

SEQ ID NO: 4879 - protein, 6 aa, Homo sapiens
SLNPNR

SEQ ID NO: 4880 - protein, 20 aa, Homo sapiens
SLPAPWLSMAPVSWITPGLK

SEQ ID NO: 4881 - protein, 16 aa, Homo sapiens
SLPEGVANGIEVYSTK

SEQ ID NO: 4882 - protein, 13 aa, Homo sapiens
SLPGFSHMAPLPK

SEQ ID NO: 4883 - protein, 37 aa, Homo sapiens
SLPMDHPDSSQHGPPFEGQSQVQPPPSQEATPLQQEK

SEQ ID NO: 4884 - protein, 15 aa, Homo sapiens
SLPVSDSVLSGFEQR

SEQ ID NO: 4885 - protein, 6 aa, Homo sapiens
SLQEMK

SEQ ID NO: 4886 - protein, 7 aa, Homo sapiens
SLQERIK

SEQ ID NO: 4887 - protein, 12 aa, Homo sapiens
SLQGDKLEVSLK

SEQ ID NO: 4888 - protein, 7 aa, Homo sapiens
SLQLHLK

SEQ ID NO: 4889 - protein, 14 aa, Homo sapiens
SLSGTAFGGFLMFK

SEQ ID NO: 4890 - protein, 6 aa, Homo sapiens
SLSLIR

SEQ ID NO: 4891 - protein, 22 aa, Homo sapiens
SLSNVIAHEISHSWTGNLVTNK

SEQ ID NO: 4892 - protein, 7 aa, Homo sapiens
SLSSMTR

SEQ ID NO: 4893 - protein, 13 aa, Homo sapiens
SLTNDWEDHLAVK

SEQ ID NO: 4894 - protein, 8 aa, Homo sapiens
SLTPHFAR

SEQ ID NO: 4895 - protein, 9 aa, Homo sapiens
SLVGLGGTK

SEQ ID NO: 4896 - protein, 7 aa, Homo sapiens
SLWDFLK

SEQ ID NO: 4897 - protein, 16 aa, Homo sapiens
SLWDFLKLDVTTSIGR

SEQ ID NO: 4898 - protein, 6 aa, Homo sapiens
SLYGEK

SEQ ID NO: 4899 - protein, 10 aa, Homo sapiens
SLYNLGGSKR

SEQ ID NO: 4900 - protein, 21 aa, Homo sapiens
SLYVSATVILHSGSDMVQAER

SEQ ID NO: 4901 - protein, 8 aa, Homo sapiens
SMDEFLLK

SEQ ID NO: 4902 - protein, 22 aa, Homo sapiens
SMGGKEDLIWELLNQAQEHFGK

SEQ ID NO: 4903 - protein, 39 aa, Homo sapiens
SMQGGLVGNDETVALTAFVTIALHHGLAVFQDEGAEPLK

SEQ ID NO: 4904 - protein, 41 aa, Homo sapiens
SMQGGLVGNDETVALTAFVTIALHHGLAVFQDEGAEPLKQR

SEQ ID NO: 4905 - protein, 16 aa, Homo sapiens
SNALDIIFQTDLTGQK

SEQ ID NO: 4906 - protein, 11 aa, Homo sapiens
SNFAEALAAHK

SEQ ID NO: 4907 - protein, 22 aa, Homo sapiens
SNFLNCYVSGFHPSDIEVDLLK

SEQ ID NO: 4908 - protein, 9 aa, Homo sapiens
SNLPIFLPR

SEQ ID NO: 4909 - protein, 11 aa, Homo sapiens
SNTVASLHTEK

SEQ ID NO: 4910 - protein, 16 aa, Homo sapiens
SNVDMDFEVENAVLGK

SEQ ID NO: 4911 - protein, 19 aa, Homo sapiens
SNVDMDFEVENAVLGKDFK

SEQ ID NO: 4912 - protein, 12 aa, Homo sapiens
SNVSDAVAQSTR

SEQ ID NO: 4913 - protein, 10 aa, Homo sapiens
SPAFTDLHLR

SEQ ID NO: 4914 - protein, 28 aa, Homo sapiens
SPCYGYQWVSEEHEEAHHTAYLVFSPSK

SEQ ID NO: 4915 - protein, 13 aa, Homo sapiens
SPDGDSSLAASER

SEQ ID NO: 4916 - protein, 13 aa, Homo sapiens
SPDVINGSPISQK

SEQ ID NO: 4917 - protein, 9 aa, Homo sapiens
SPELQAEAK

SEQ ID NO: 4918 - protein, 16 aa, Homo sapiens
SPEQQETVLDGNLIIR

SEQ ID NO: 4919 - protein, 25 aa, Homo sapiens
SPESDSIQWFHNGNLIPTHTQPSYR

SEQ ID NO: 4920 - protein, 9 aa, Homo sapiens
SPFALRPLR

SEQ ID NO: 4921 - protein, 6 aa, Homo sapiens
SPFNDR

SEQ ID NO: 4922 - protein, 6 aa, Homo sapiens
SPFNNR

SEQ ID NO: 4923 - protein, 15 aa, Homo sapiens
SPFSVAVSPSLDLSK

SEQ ID NO: 4924 - protein, 29 aa, Homo sapiens
SPHWGSTYSVSVVETDYDQYALLYSQGSK

SEQ ID NO: 4925 - protein, 7 aa, Homo sapiens
SPLFMGK

SEQ ID NO: 4926 - protein, 6 aa, Homo sapiens
SPLGLK

SEQ ID NO: 4927 - protein, 10 aa, Homo sapiens
SPLNDFQVLR

SEQ ID NO: 4928 - protein, 26 aa, Homo sapiens
SPPEISHGVVAHMSDSYQYGEEVTYK

SEQ ID NO: 4929 - protein, 17 aa, Homo sapiens
SPPGVCSRDPTPEQTHR

SEQ ID NO: 4930 - protein, 7 aa, Homo sapiens
SPPHLIK

SEQ ID NO: 4931 - protein, 8 aa, Homo sapiens
SPRPSSYK

SEQ ID NO: 4932 - protein, 9 aa, Homo sapiens
SPSQADINK

SEQ ID NO: 4933 - protein, 52 aa, Homo sapiens
SPSSSQPLPQVPAPAQSQTQFHVQPQPQPKPQVQLHVQSQTQPVSLANTQPR

SEQ ID NO: 4934 - protein, 20 aa, Homo sapiens
SPVGVQPILNEHTFCAGMSK

SEQ ID NO: 4935 - protein, 18 aa, Homo sapiens
SPVTLLAAVMSLPEEHNK

SEQ ID NO: 4936 - protein, 6 aa, Homo sapiens
SPYIDK

SEQ ID NO: 4937 - protein, 17 aa, Homo sapiens
SPYIDKITHYNYLILSK

SEQ ID NO: 4938 - protein, 11 aa, Homo sapiens
SPYQLVLQHSR

SEQ ID NO: 4939 - protein, 8 aa, Homo sapiens
SQAIATKK

SEQ ID NO: 4940 - protein, 16 aa, Homo sapiens
SQDEAPGDPIQQLNLK

SEQ ID NO: 4941 - protein, 15 aa, Homo sapiens
SQDILLSVENTVIYR

SEQ ID NO: 4942 - protein, 11 aa, Homo sapiens
SQEFLEDADRK

SEQ ID NO: 4943 - protein, 6 aa, Homo sapiens
SQFLIK

SEQ ID NO: 4944 - protein, 13 aa, Homo sapiens
SQHLDNFSNQIGK

SEQ ID NO: 4945 - protein, 14 aa, Homo sapiens
SQIHDIVLVGGSTR

SEQ ID NO: 4946 - protein, 5 aa, Homo sapiens
SQILK

SEQ ID NO: 4947 - protein, 5 aa, Homo sapiens
SQLIK

SEQ ID NO: 4948 - protein, 5 aa, Homo sapiens
SQLLK

SEQ ID NO: 4949 - protein, 8 aa, Homo sapiens
SQLLPVGR

SEQ ID NO: 4950 - protein, 8 aa, Homo sapiens
SQLVYQSR

SEQ ID NO: 4951 - protein, 44 aa, Homo sapiens
SQPGSTPLHGQPLVVLQGNNIILEHHVAQEPSPGQPSTFIVPFR

SEQ ID NO: 4952 - protein, 8 aa, Homo sapiens
SQPMGLWR

SEQ ID NO: 4953 - protein, 19 aa, Homo sapiens
SQPSQPSDHHETPPAAPDR

SEQ ID NO: 4954 - protein, 25 aa, Homo sapiens
SQPSQPSDHHETPPAAPDRNPQNIR

SEQ ID NO: 4955 - protein, 8 aa, Homo sapiens
SQVEPETR

SEQ ID NO: 4956 - protein, 7 aa, Homo sapiens
SQVIAEK

SEQ ID NO: 4957 - protein, 11 aa, Homo sapiens
SQYEQLAEQNR

SEQ ID NO: 4958 - protein, 12 aa, Homo sapiens
SQYEQLAEQNRK

SEQ ID NO: 4959 - protein, 7 aa, Homo sapiens
SRIEVLK

SEQ ID NO: 4960 - protein, 6 aa, Homo sapiens
SRINPK

SEQ ID NO: 4961 - protein, 14 aa, Homo sapiens
SRLDTLAQEVALLK

SEQ ID NO: 4962 - protein, 15 aa, Homo sapiens
SRLIVYLALLGSENR

SEQ ID NO: 4963 - protein, 14 aa, Homo sapiens
SRPEFMLPVHFYGK

SEQ ID NO: 4964 - protein, 22 aa, Homo sapiens
SRPSQVLDSPFPTGSAFGFSLR

SEQ ID NO: 4965 - protein, 9 aa, Homo sapiens
SRVTISVDK

SEQ ID NO: 4966 - protein, 9 aa, Homo sapiens
SRWPAVFTR

SEQ ID NO: 4967 - protein, 10 aa, Homo sapiens
SSALDMENFR

SEQ ID NO: 4968 - protein, 20 aa, Homo sapiens
SSALDMENFRTEVNVLPGAK

SEQ ID NO: 4969 - protein, 17 aa, Homo sapiens
SSFTVQDLKPFTEYVFR

SEQ ID NO: 4970 - protein, 9 aa, Homo sapiens
SSFVAPLEK

SEQ ID NO: 4971 - protein, 14 aa, Homo sapiens
SSFYVNGLTLGGQK

SEQ ID NO: 4972 - protein, 7 aa, Homo sapiens
SSGAFWK

SEQ ID NO: 4973 - protein, 12 aa, Homo sapiens
SSGQWQTPGATR

SEQ ID NO: 4974 - protein, 11 aa, Homo sapiens
SSGSLLNNAIK

SEQ ID NO: 4975 - protein, 41 aa, Homo sapiens
SSGSLLNNAIKGGVEDEVTLSAYITIALLEIPLTVTHPVVR

SEQ ID NO: 4976 - protein, 9 aa, Homo sapiens
SSGWHFVVK

SEQ ID NO: 4977 - protein, 20 aa, Homo sapiens
SSIDIENGFISESQYTYALK

SEQ ID NO: 4978 - protein, 22 aa, Homo sapiens
SSIDIENGFISESQYTYALKEK

SEQ ID NO: 4979 - protein, 6 aa, Homo sapiens
SSIIIR

SEQ ID NO: 4980 - protein, 5 aa, Homo sapiens
SSIIK

SEQ ID NO: 4981 - protein, 5 aa, Homo sapiens
SSILK

SEQ ID NO: 4982 - protein, 5 aa, Homo sapiens
SSLIK

SEQ ID NO: 4983 - protein, 5 aa, Homo sapiens
SSLLK

SEQ ID NO: 4984 - protein, 6 aa, Homo sapiens
SSLLLR

SEQ ID NO: 4985 - protein, 9 aa, Homo sapiens
SSLLLVLFR

SEQ ID NO: 4986 - protein, 13 aa, Homo sapiens
SSLSVPYVIVPLK

SEQ ID NO: 4987 - protein, 10 aa, Homo sapiens
SSMAVHSLFK

SEQ ID NO: 4988 - protein, 12 aa, Homo sapiens
SSNLIILEEHLK

SEQ ID NO: 4989 - protein, 19 aa, Homo sapiens
SSNNPHSPIVEEFQVPYNK

SEQ ID NO: 4990 - protein, 11 aa, Homo sapiens
SSNTYTLTDVR

SEQ ID NO: 4991 - protein, 18 aa, Homo sapiens
SSPAAKPGSTPSRPSSAK

SEQ ID NO: 4992 - protein, 19 aa, Homo sapiens
SSPVVIDASTAIDAPSNLR

SEQ ID NO: 4993 - protein, 8 aa, Homo sapiens
SSPYYALR

SEQ ID NO: 4994 - protein, 11 aa, Homo sapiens
SSQESYAHGTK

SEQ ID NO: 4995 - protein, 7 aa, Homo sapiens
SSQMETK

SEQ ID NO: 4996 - protein, 23 aa, Homo sapiens
SSQTVAVHHPQYGFSVQGEYQGR

SEQ ID NO: 4997 - protein, 15 aa, Homo sapiens
SSSNEEVMFLTVQVK

SEQ ID NO: 4998 - protein, 9 aa, Homo sapiens
SSSQELGLK

SEQ ID NO: 4999 - protein, 16 aa, Homo sapiens
SSSYSKQFTSSTSYNR

SEQ ID NO: 5000 - protein, 10 aa, Homo sapiens
SSTGPGEQLR

SEQ ID NO: 5001 - protein, 8 aa, Homo sapiens
SSTPEEVK

SEQ ID NO: 5002 - protein, 9 aa, Homo sapiens
SSTPEEVKK

SEQ ID NO: 5003 - protein, 30 aa, Homo sapiens
SSTSPTTNVLLSPLSVATALSALSLGAEQR

SEQ ID NO: 5004 - protein, 14 aa, Homo sapiens
SSTTKPPFKPHGSR

SEQ ID NO: 5005 - protein, 16 aa, Homo sapiens
SSVAAMHWMDGSVVTR

SEQ ID NO: 5006 - protein, 6 aa, Homo sapiens
SSWSMR

SEQ ID NO: 5007 - protein, 21 aa, Homo sapiens
STAAMSTYTGIFTDQVLSVLK

SEQ ID NO: 5008 - protein, 24 aa, Homo sapiens
STAAMSTYTGIFTDQVLSVLKGEE

SEQ ID NO: 5009 - protein, 24 aa, Homo sapiens
STATISGLKPGVDYTITVYAVTGR

SEQ ID NO: 5010 - protein, 39 aa, Homo sapiens
STATISGLKPGVDYTITVYAVTGRGDSPASSKPISINYR

SEQ ID NO: 5011 - protein, 20 aa, Homo sapiens
STDTSCVNPPTVQNAHILSR

SEQ ID NO: 5012 - protein, 12 aa, Homo sapiens
STDYGIFQINSR

SEQ ID NO: 5013 - protein, 14 aa, Homo sapiens
STGGAPTFNVTVTK

SEQ ID NO: 5014 - protein, 9 aa, Homo sapiens
STGSWSTLK

SEQ ID NO: 5015 - protein, 10 aa, Homo sapiens
STHQAAIVSK

SEQ ID NO: 5016 - protein, 9 aa, Homo sapiens
STHTLDLSR

SEQ ID NO: 5017 - protein, 20 aa, Homo sapiens
STKEIPDEISILLLGVAHFK

SEQ ID NO: 5018 - protein, 8 aa, Homo sapiens
STLEPVEK

SEQ ID NO: 5019 - protein, 8 aa, Homo sapiens
STMKPVQK

SEQ ID NO: 5020 - protein, 25 aa, Homo sapiens
STQDTVIALDALSAYWIASHTTEER

SEQ ID NO: 5021 - protein, 22 aa, Homo sapiens
STSIVIMLTDGDANVGESRPEK

SEQ ID NO: 5022 - protein, 13 aa, Homo sapiens
STSPPKQAEAVLK

SEQ ID NO: 5023 - protein, 35 aa, Homo sapiens
STTDNDIALLHLAQPATLSQTIVPICLPDSGLAER

SEQ ID NO: 5024 - protein, 10 aa, Homo sapiens
STTPDITGYR

SEQ ID NO: 5025 - protein, 11 aa, Homo sapiens
STVEGIQASVK

SEQ ID NO: 5026 - protein, 7 aa, Homo sapiens
STVEIFK

SEQ ID NO: 5027 - protein, 7 aa, Homo sapiens
STVELFK

SEQ ID NO: 5028 - protein, 13 aa, Homo sapiens
STVELFKFQEEEK

SEQ ID NO: 5029 - protein, 12 aa, Homo sapiens
STVLTIPEIIIK

SEQ ID NO: 5030 - protein, 9 aa, Homo sapiens
STVSSLLQK

SEQ ID NO: 5031 - protein, 12 aa, Homo sapiens
SVAPHAPASPAR

SEQ ID NO: 5032 - protein, 7 aa, Homo sapiens
SVDEALR

SEQ ID NO: 5033 - protein, 7 aa, Homo sapiens
SVDIWLR

SEQ ID NO: 5034 - protein, 6 aa, Homo sapiens
SVETIK

SEQ ID NO: 5035 - protein, 6 aa, Homo sapiens
SVETLK

SEQ ID NO: 5036 - protein, 7 aa, Homo sapiens
SVFLHAR

SEQ ID NO: 5037 - protein, 9 aa, Homo sapiens
SVGFHLPSR

SEQ ID NO: 5038 - protein, 24 aa, Homo sapiens
SVGILSPSYTLLYRYMHFLENQVR

SEQ ID NO: 5039 - protein, 7 aa, Homo sapiens
SVHELEK

SEQ ID NO: 5040 - protein, 10 aa, Homo sapiens
SVHKVEPITK

SEQ ID NO: 5041 - protein, 14 aa, Homo sapiens
SVHNGAPAPVSGEK

SEQ ID NO: 5042 - protein, 14 aa, Homo sapiens
SVIPSDGPSVACVK

SEQ ID NO: 5043 - protein, 15 aa, Homo sapiens
SVIPSDGPSVACVKK

SEQ ID NO: 5044 - protein, 12 aa, Homo sapiens
SVIRPATQQAQK

SEQ ID NO: 5045 - protein, 10 aa, Homo sapiens
SVLGQLGITK

SEQ ID NO: 5046 - protein, 11 aa, Homo sapiens
SVLPSFPDDTK

SEQ ID NO: 5047 - protein, 27 aa, Homo sapiens
SVLRPSQFGGQPCTAPLVAFQPCIPSK

SEQ ID NO: 5048 - protein, 19 aa, Homo sapiens
SVMAPFTMTIDAHTNGNGK

SEQ ID NO: 5049 - protein, 9 aa, Homo sapiens
SVNDLYIQK

SEQ ID NO: 5050 - protein, 18 aa, Homo sapiens
SVNDLYIQKQFPILLDFK

SEQ ID NO: 5051 - protein, 11 aa, Homo sapiens
SVNILFNLTHR

SEQ ID NO: 5052 - protein, 8 aa, Homo sapiens
SVNNVVVR

SEQ ID NO: 5053 - protein, 10 aa, Homo sapiens
SVPMVPPGIK

SEQ ID NO: 5054 - protein, 23 aa, Homo sapiens
SVPPSASHVAPTETFTYEWTVPK

SEQ ID NO: 5055 - protein, 16 aa, Homo sapiens
SVQEIQATFFYFTPNK

SEQ ID NO: 5056 - protein, 7 aa, Homo sapiens
SVQLTEK

SEQ ID NO: 5057 - protein, 13 aa, Homo sapiens
SVQYDDVPEYKDR

SEQ ID NO: 5058 - protein, 17 aa, Homo sapiens
SVSDGIAALDLNAVANK

SEQ ID NO: 5059 - protein, 13 aa, Homo sapiens
SVSLPSLDPASAK

SEQ ID NO: 5060 - protein, 26 aa, Homo sapiens
SVSYPSLLSHITSSLMNHPVIPMANK

SEQ ID NO: 5061 - protein, 14 aa, Homo sapiens
SVTEQGAELSNEER

SEQ ID NO: 5062 - protein, 29 aa, Homo sapiens
SVTLFGESAGAASVSLHLLSPGSHSLFTR

SEQ ID NO: 5063 - protein, 7 aa, Homo sapiens
SVTLNQR

SEQ ID NO: 5064 - protein, 18 aa, Homo sapiens
SVTVAEGLIEDHFDVTVK

SEQ ID NO: 5065 - protein, 20 aa, Homo sapiens
SVVLIPLGAVDDGEHSQNEK

SEQ ID NO: 5066 - protein, 19 aa, Homo sapiens
SVVLMSHLGRPDGVPMPDK

SEQ ID NO: 5067 - protein, 8 aa, Homo sapiens
SVVMPMEK

SEQ ID NO: 5068 - protein, 12 aa, Homo sapiens
SWFEPLVEDMQR

SEQ ID NO: 5069 - protein, 15 aa, Homo sapiens
SWLAELQQWLKPGLK

SEQ ID NO: 5070 - protein, 6 aa, Homo sapiens
SWNLMK

SEQ ID NO: 5071 - protein, 22 aa, Homo sapiens
SWVPHTFESELSDPVELLVAES

SEQ ID NO: 5072 - protein, 10 aa, Homo sapiens
SWYLEDNINK

SEQ ID NO: 5073 - protein, 5 aa, Homo sapiens
SYADK

SEQ ID NO: 5074 - protein, 5 aa, Homo sapiens
SYFEK

SEQ ID NO: 5075 - protein, 16 aa, Homo sapiens
SYFPESWLWEVHLVPR

SEQ ID NO: 5076 - protein, 22 aa, Homo sapiens
SYIFIDEAHITQSLTWLSQMQK

SEQ ID NO: 5077 - protein, 5 aa, Homo sapiens
SYPDK

SEQ ID NO: 5078 - protein, 9 aa, Homo sapiens
SYPEILTLK

SEQ ID NO: 5079 - protein, 7 aa, Homo sapiens
SYPPDLR

SEQ ID NO: 5080 - protein, 32 aa, Homo sapiens
SYQLLVVENTVEVAQFINNNPEFLQLAEPFWK

SEQ ID NO: 5081 - protein, 5 aa, Homo sapiens
SYQWK

SEQ ID NO: 5082 - protein, 15 aa, Homo sapiens
SYSCQVMHEGSTVEK

SEQ ID NO: 5083 - protein, 15 aa, Homo sapiens
SYSCQVTHEGSTVEK

SEQ ID NO: 5084 - protein, 17 aa, Homo sapiens
SYTIHYSEQGVEWKPYR

SEQ ID NO: 5085 - protein, 14 aa, Homo sapiens
SYTITGLQPGTDYK

SEQ ID NO: 5086 - protein, 11 aa, Homo sapiens
SYTSHTNEIHK

SEQ ID NO: 5087 - protein, 13 aa, Homo sapiens
SYTSHTNEIHKGK

SEQ ID NO: 5088 - protein, 16 aa, Homo sapiens
SYTVAIAGYALAQMGR

SEQ ID NO: 5089 - protein, 8 aa, Homo sapiens
SYYWIGIR

SEQ ID NO: 5090 - protein, 12 aa, Homo sapiens
TAAENDFVTLKK

SEQ ID NO: 5091 - protein, 12 aa, Homo sapiens
TAAENEFVTLKK

SEQ ID NO: 5092 - protein, 10 aa, Homo sapiens
TAAISGYSFK

SEQ ID NO: 5093 - protein, 9 aa, Homo sapiens
TAAQNLYEK

SEQ ID NO: 5094 - protein, 11 aa, Homo sapiens
TADGIVSHLKK

SEQ ID NO: 5095 - protein, 10 aa, Homo sapiens
TAEDYQALNK

SEQ ID NO: 5096 - protein, 15 aa, Homo sapiens
TAEYDVAYGESHLFR

SEQ ID NO: 5097 - protein, 19 aa, Homo sapiens
TAFDEAIAELDTLNEESYK

SEQ ID NO: 5098 - protein, 19 aa, Homo sapiens
TAFDEAIAELDTLSEESYK

SEQ ID NO: 5099 - protein, 21 aa, Homo sapiens
TAFISDFAVTADGNAFIGDIK

SEQ ID NO: 5100 - protein, 23 aa, Homo sapiens
TAFISDFAVTADGNAFIGDIKDK

SEQ ID NO: 5101 - protein, 13 aa, Homo sapiens
TAFQEALDAAGDK

SEQ ID NO: 5102 - protein, 14 aa, Homo sapiens
TAFYLAEFFVNEAR

SEQ ID NO: 5103 - protein, 6 aa, Homo sapiens
TAGLVK

SEQ ID NO: 5104 - protein, 14 aa, Homo sapiens
TAGWNIPMGLLYNK

SEQ ID NO: 5105 - protein, 10 aa, Homo sapiens
TAHIDVHFLK

SEQ ID NO: 5106 - protein, 28 aa, Homo sapiens
TALLDAAGVASLLTTAEVVVTEIPKEEK

SEQ ID NO: 5107 - protein, 10 aa, Homo sapiens
TAPDTKPSPR

SEQ ID NO: 5108 - protein, 14 aa, Homo sapiens
TAQEGDHGSHVYTK

SEQ ID NO: 5109 - protein, 29 aa, Homo sapiens
TAQEGDHGSHVYTKALLAYAFALAGNQDK

SEQ ID NO: 5110 - protein, 5 aa, Homo sapiens
TARLK

SEQ ID NO: 5111 - protein, 8 aa, Homo sapiens
TASDFITK

SEQ ID NO: 5112 - protein, 10 aa, Homo sapiens
TASTPTPDDK

SEQ ID NO: 5113 - protein, 14 aa, Homo sapiens
TASTPTPDDKLFQK

SEQ ID NO: 5114 - protein, 23 aa, Homo sapiens
TATESFASDPILYRPVAVALDTK

SEQ ID NO: 5115 - protein, 13 aa, Homo sapiens
TATPQQAQEVHEK

SEQ ID NO: 5116 - protein, 13 aa, Homo sapiens
TATSEYQTFFNPR

SEQ ID NO: 5117 - protein, 17 aa, Homo sapiens
TCPKPDDLPFSTVVPLK

SEQ ID NO: 5118 - protein, 7 aa, Homo sapiens
TCQVNGR

SEQ ID NO: 5119 - protein, 8 aa, Homo sapiens
TDAGFTLR

SEQ ID NO: 5120 - protein, 9 aa, Homo sapiens
TDASDVKPC

SEQ ID NO: 5121 - protein, 18 aa, Homo sapiens
TDCLSLPSFENAIPMGEK

SEQ ID NO: 5122 - protein, 8 aa, Homo sapiens
TDEGIAYR

SEQ ID NO: 5123 - protein, 29 aa, Homo sapiens
TDELPQLVTLPHPNLHGPEILDVPSTVQK

SEQ ID NO: 5124 - protein, 5 aa, Homo sapiens
TDFYK

SEQ ID NO: 5125 - protein, 42 aa, Homo sapiens
TDGEGALSEPSATVTIEELAAPPPPVLMHHGESSQVLHPGNK

SEQ ID NO: 5126 - protein, 6 aa, Homo sapiens
TDLFPK

SEQ ID NO: 5127 - protein, 22 aa, Homo sapiens
TDQVIQSLIALVNDPQPEHPLR

SEQ ID NO: 5128 - protein, 7 aa, Homo sapiens
TDRILMK

SEQ ID NO: 5129 - protein, 15 aa, Homo sapiens
TDTSHHDQDHPTFNK

SEQ ID NO: 5130 - protein, 29 aa, Homo sapiens
TDTSHHDQDHPTFNKITPNLAEFAFSLYR

SEQ ID NO: 5131 - protein, 8 aa, Homo sapiens
TEALTSAK

SEQ ID NO: 5132 - protein, 19 aa, Homo sapiens
TECIKPVVQEVLTITPFQR

SEQ ID NO: 5133 - protein, 11 aa, Homo sapiens
TEDSSSFLIDK

SEQ ID NO: 5134 - protein, 8 aa, Homo sapiens
TEDTIFLR

SEQ ID NO: 5135 - protein, 12 aa, Homo sapiens
TEGDGVYTLNDK

SEQ ID NO: 5136 - protein, 13 aa, Homo sapiens
TEGDGVYTLNDKK

SEQ ID NO: 5137 - protein, 13 aa, Homo sapiens
TEGDGVYTLNNEK

SEQ ID NO: 5138 - protein, 12 aa, Homo sapiens
TEGQFVDLTGNR

SEQ ID NO: 5139 - protein, 17 aa, Homo sapiens
TEHGSEMLFFGNAIEGK

SEQ ID NO: 5140 - protein, 10 aa, Homo sapiens
TEHINIHQLR

SEQ ID NO: 5141 - protein, 14 aa, Homo sapiens
TEHPFTVEEFVLPK

SEQ ID NO: 5142 - protein, 12 aa, Homo sapiens
TEHYEEQIEAFK

SEQ ID NO: 5143 - protein, 22 aa, Homo sapiens
TEIDKPSQMQVTDVQDNSISVK

SEQ ID NO: 5144 - protein, 16 aa, Homo sapiens
TELRPGETLNVNFLLR

SEQ ID NO: 5145 - protein, 15 aa, Homo sapiens
TELVEPTEYLVVHLK

SEQ ID NO: 5146 - protein, 7 aa, Homo sapiens
TENELLR

SEQ ID NO: 5147 - protein, 9 aa, Homo sapiens
TENLNDDEK

SEQ ID NO: 5148 - protein, 12 aa, Homo sapiens
TEQWSTLPPETK

SEQ ID NO: 5149 - protein, 21 aa, Homo sapiens
TEQWSTLPPETKDHAVDLIQK

SEQ ID NO: 5150 - protein, 13 aa, Homo sapiens
TERELLESYIDGR

SEQ ID NO: 5151 - protein, 7 aa, Homo sapiens
TESIIHR

SEQ ID NO: 5152 - protein, 10 aa, Homo sapiens
TEVNVLPGAK

SEQ ID NO: 5153 - protein, 14 aa, Homo sapiens
TEVSSNHVLIYLDK

SEQ ID NO: 5154 - protein, 9 aa, Homo sapiens
TFAHYATFR

SEQ ID NO: 5155 - protein, 6 aa, Homo sapiens
TFAQAR

SEQ ID NO: 5156 - protein, 5 aa, Homo sapiens
TFASK

SEQ ID NO: 5157 - protein, 7 aa, Homo sapiens
TFDIEEK

SEQ ID NO: 5158 - protein, 7 aa, Homo sapiens
TFDLEEK

SEQ ID NO: 5159 - protein, 5 aa, Homo sapiens
TFFFK

SEQ ID NO: 5160 - protein, 17 aa, Homo sapiens
TFGSGEADCGLRPLFEK

SEQ ID NO: 5161 - protein, 12 aa, Homo sapiens
TFHEASEDCISR

SEQ ID NO: 5162 - protein, 13 aa, Homo sapiens
TFHFNTVEEVHSR

SEQ ID NO: 5163 - protein, 17 aa, Homo sapiens
TFHIFYYLLSGAGEHLK

SEQ ID NO: 5164 - protein, 12 aa, Homo sapiens
TFIAIKPDGVQR

SEQ ID NO: 5165 - protein, 8 aa, Homo sapiens
TFIEDVNK

SEQ ID NO: 5166 - protein, 7 aa, Homo sapiens
TFISPIK

SEQ ID NO: 5167 - protein, 17 aa, Homo sapiens
TFKDLHFLEELQLGHNR

SEQ ID NO: 5168 - protein, 20 aa, Homo sapiens
TFPGFFSPMLGEFVSETESR

SEQ ID NO: 5169 - protein, 10 aa, Homo sapiens
TFSEWLESVK

SEQ ID NO: 5170 - protein, 24 aa, Homo sapiens
TFSHELSDFGLESTAGEIPVVAIR

SEQ ID NO: 5171 - protein, 8 aa, Homo sapiens
TFTLLDPK

SEQ ID NO: 5172 - protein, 11 aa, Homo sapiens
TFTPQPPGLER

SEQ ID NO: 5173 - protein, 15 aa, Homo sapiens
TFTTQETITNAETAK

SEQ ID NO: 5174 - protein, 8 aa, Homo sapiens
TFVLNFIK

SEQ ID NO: 5175 - protein, 20 aa, Homo sapiens
TFVLSALQPSPTHSSSNTQR

SEQ ID NO: 5176 - protein, 16 aa, Homo sapiens
TFVNITPAEVGVLVGK

SEQ ID NO: 5177 - protein, 20 aa, Homo sapiens
TFYEPGEEITYSCKPGYVSR

SEQ ID NO: 5178 - protein, 10 aa, Homo sapiens
TFYSCTTEGR

SEQ ID NO: 5179 - protein, 8 aa, Homo sapiens
TGAQELLR

SEQ ID NO: 5180 - protein, 10 aa, Homo sapiens
TGAVSGHSLK

SEQ ID NO: 5181 - protein, 10 aa, Homo sapiens
TGDEITYQCR

SEQ ID NO: 5182 - protein, 10 aa, Homo sapiens
TGDIVEFVCK

SEQ ID NO: 5183 - protein, 8 aa, Homo sapiens
TGEAVAEK

SEQ ID NO: 5184 - protein, 16 aa, Homo sapiens
TGEAVAEKDSEITFIK

SEQ ID NO: 5185 - protein, 11 aa, Homo sapiens
TGESAEFVCKR

SEQ ID NO: 5186 - protein, 10 aa, Homo sapiens
TGESVEFVCK

SEQ ID NO: 5187 - protein, 11 aa, Homo sapiens
TGESVEFVCKR

SEQ ID NO: 5188 - protein, 9 aa, Homo sapiens
TGHLLIQGR

SEQ ID NO: 5189 - protein, 10 aa, Homo sapiens
TGISPLALIK

SEQ ID NO: 5190 - protein, 9 aa, Homo sapiens
TGIVSGFGR

SEQ ID NO: 5191 - protein, 18 aa, Homo sapiens
TGKAAQVTIQSSGTFSSK

SEQ ID NO: 5192 - protein, 27 aa, Homo sapiens
TGLDSPTGIDFSDITANSFTVHWIAPR

SEQ ID NO: 5193 - protein, 8 aa, Homo sapiens
TGLKEFLK

SEQ ID NO: 5194 - protein, 11 aa, Homo sapiens
TGLLLLSDPDK

SEQ ID NO: 5195 - protein, 22 aa, Homo sapiens
TGLLLLSDPDKVTIGLLFWDGR

SEQ ID NO: 5196 - protein, 9 aa, Homo sapiens
TGLQEVEVK

SEQ ID NO: 5197 - protein, 11 aa, Homo sapiens
TGPNLHGLFGR

SEQ ID NO: 5198 - protein, 29 aa, Homo sapiens
TGSGGPGNHPHGPDASAEGLNPYGLVAPR

SEQ ID NO: 5199 - protein, 9 aa, Homo sapiens
TGTHGLLVK

SEQ ID NO: 5200 - protein, 14 aa, Homo sapiens
TGTHGLLVKQEDMK

SEQ ID NO: 5201 - protein, 6 aa, Homo sapiens
TGTTLK

SEQ ID NO: 5202 - protein, 16 aa, Homo sapiens
TGVAVNKPAEFTVDAK

SEQ ID NO: 5203 - protein, 16 aa, Homo sapiens
TGVELGKPTHFTVNAK

SEQ ID NO: 5204 - protein, 15 aa, Homo sapiens
TGVITSPDFPNPYPK

SEQ ID NO: 5205 - protein, 10 aa, Homo sapiens
TGYYFDGISR

SEQ ID NO: 5206 - protein, 9 aa, Homo sapiens
THAVLVALK

SEQ ID NO: 5207 - protein, 10 aa, Homo sapiens
THAVLVALKR

SEQ ID NO: 5208 - protein, 35 aa, Homo sapiens
THGLLGQFFHPIGFEVSDIHPGSDPTKPDATMVVR

SEQ ID NO: 5209 - protein, 19 aa, Homo sapiens
THGMLPGLEPFSHYTLNVR

SEQ ID NO: 5210 - protein, 9 aa, Homo sapiens
THILLFLPK

SEQ ID NO: 5211 - protein, 11 aa, Homo sapiens
THLAPYSDELR

SEQ ID NO: 5212 - protein, 10 aa, Homo sapiens
THLPEVFLSK

SEQ ID NO: 5213 - protein, 16 aa, Homo sapiens
THMTHHPISDHEATLR

SEQ ID NO: 5214 - protein, 16 aa, Homo sapiens
THNLEPYFESFINNLR

SEQ ID NO: 5215 - protein, 17 aa, Homo sapiens
THNLEPYFESFINNLRR

SEQ ID NO: 5216 - protein, 6 aa, Homo sapiens
THPQFR

SEQ ID NO: 5217 - protein, 16 aa, Homo sapiens
THVTHHPISDHEATLR

SEQ ID NO: 5218 - protein, 16 aa, Homo sapiens
THVTHHPLSDHEATLR

SEQ ID NO: 5219 - protein, 9 aa, Homo sapiens
TIAPALVSK

SEQ ID NO: 5220 - protein, 7 aa, Homo sapiens
TIAYENK

SEQ ID NO: 5221 - protein, 10 aa, Homo sapiens
TIDDLEDKLK

SEQ ID NO: 5222 - protein, 8 aa, Homo sapiens
TIDDLEEK

SEQ ID NO: 5223 - protein, 13 aa, Homo sapiens
TIDDLEETLASAK

SEQ ID NO: 5224 - protein, 6 aa, Homo sapiens
TIDDLK

SEQ ID NO: 5225 - protein, 6 aa, Homo sapiens
TIEQIK

SEQ ID NO: 5226 - protein, 28 aa, Homo sapiens
TIESILEPVAQQISHLVIMHEEGEVDGK

SEQ ID NO: 5227 - protein, 16 aa, Homo sapiens
TIHDLHLFIENIDFNK

SEQ ID NO: 5228 - protein, 38 aa, Homo sapiens
TIHLTMPQLVLQGSYDLQDLLAQAELPAILHTELNLQK

SEQ ID NO: 5229 - protein, 5 aa, Homo sapiens
TIIQK

SEQ ID NO: 5230 - protein, 7 aa, Homo sapiens
TIKPDVR

SEQ ID NO: 5231 - protein, 13 aa, Homo sapiens
TILAVTRPFISSK

SEQ ID NO: 5232 - protein, 7 aa, Homo sapiens
TILDDLR

SEQ ID NO: 5233 - protein, 22 aa, Homo sapiens
TILDDLRAEDHFSVIDFNQNIR

SEQ ID NO: 5234 - protein, 18 aa, Homo sapiens
TILGTMPAFEVSLQALQK

SEQ ID NO: 5235 - protein, 12 aa, Homo sapiens
TILISAHGNSSR

SEQ ID NO: 5236 - protein, 5 aa, Homo sapiens
TILQK

SEQ ID NO: 5237 - protein, 8 aa, Homo sapiens
TIMVDDSK

SEQ ID NO: 5238 - protein, 6 aa, Homo sapiens
TINIAK

SEQ ID NO: 5239 - protein, 7 aa, Homo sapiens
TINVPLR

SEQ ID NO: 5240 - protein, 8 aa, Homo sapiens
TINVPLRR

SEQ ID NO: 5241 - protein, 6 aa, Homo sapiens
TIQQIK

SEQ ID NO: 5242 - protein, 6 aa, Homo sapiens
TIQQLK

SEQ ID NO: 5243 - protein, 10 aa, Homo sapiens
TIRYPDPLIK

SEQ ID NO: 5244 - protein, 16 aa, Homo sapiens
TITLEVEPSDTIENVK

SEQ ID NO: 5245 - protein, 18 aa, Homo sapiens
TITTTEIMNKPEETAKPK

SEQ ID NO: 5246 - protein, 26 aa, Homo sapiens
TIVRFNRPFLMIIVPTDTQNIFFMSK

SEQ ID NO: 5247 - protein, 11 aa, Homo sapiens
TIVTTLQDSIR

SEQ ID NO: 5248 - protein, 7 aa, Homo sapiens
TIYEYHR

SEQ ID NO: 5249 - protein, 12 aa, Homo sapiens
TIYTPGSTVLYR

SEQ ID NO: 5250 - protein, 18 aa, Homo sapiens
TKEEYGHSEVVEYYCNPR

SEQ ID NO: 5251 - protein, 5 aa, Homo sapiens
TKFAK

SEQ ID NO: 5252 - protein, 13 aa, Homo sapiens
TKGLCVATPVQLR

SEQ ID NO: 5253 - protein, 20 aa, Homo sapiens
TKLEEHLEGIVNIFHQYSVR

SEQ ID NO: 5254 - protein, 9 aa, Homo sapiens
TKNDFTWFK

SEQ ID NO: 5255 - protein, 16 aa, Homo sapiens
TKPSDEEMLFIYGHYK

SEQ ID NO: 5256 - protein, 15 aa, Homo sapiens
TKPYIQVDIGGGQTK

SEQ ID NO: 5257 - protein, 24 aa, Homo sapiens
TKTETITGFQVDAVPANGQTPIQR

SEQ ID NO: 5258 - protein, 7 aa, Homo sapiens
TKVFQLK

SEQ ID NO: 5259 - protein, 10 aa, Homo sapiens
TKYETELNLR

SEQ ID NO: 5260 - protein, 13 aa, Homo sapiens
TLADLTLLDSPIK

SEQ ID NO: 5261 - protein, 14 aa, Homo sapiens
TLAESALQLLYTAK

SEQ ID NO: 5262 - protein, 9 aa, Homo sapiens
TLAFPLTIR

SEQ ID NO: 5263 - protein, 11 aa, Homo sapiens
TLAGAVSDLLK

SEQ ID NO: 5264 - protein, 17 aa, Homo sapiens
TLAQLNPESSLFIIASK

SEQ ID NO: 5265 - protein, 6 aa, Homo sapiens
TLDDLK

SEQ ID NO: 5266 - protein, 7 aa, Homo sapiens
TLDLINK

SEQ ID NO: 5267 - protein, 9 aa, Homo sapiens
TLEAQLTPR

SEQ ID NO: 5268 - protein, 7 aa, Homo sapiens
TLEEEAK

SEQ ID NO: 5269 - protein, 23 aa, Homo sapiens
TLEGPVPLEVIVIDQNDNRPIFR

SEQ ID NO: 5270 - protein, 23 aa, Homo sapiens
TLEIPGNSDPNMIPDGDFNSYVR

SEQ ID NO: 5271 - protein, 10 aa, Homo sapiens
TLFGLHLSQK

SEQ ID NO: 5272 - protein, 7 aa, Homo sapiens
TLFVHAR

SEQ ID NO: 5273 - protein, 10 aa, Homo sapiens
TLHPDLGTDK

SEQ ID NO: 5274 - protein, 14 aa, Homo sapiens
TLIFPPSMHFFQAK

SEQ ID NO: 5275 - protein, 11 aa, Homo sapiens
TLKQEEETHIR

SEQ ID NO: 5276 - protein, 24 aa, Homo sapiens
TLLAEHHITNLGWHTLTLPSSGLR

SEQ ID NO: 5277 - protein, 13 aa, Homo sapiens
TLLAVTRPFISSK

SEQ ID NO: 5278 - protein, 9 aa, Homo sapiens
TLLEAENSR

SEQ ID NO: 5279 - protein, 9 aa, Homo sapiens
TLLEGEESR

SEQ ID NO: 5280 - protein, 13 aa, Homo sapiens
TLLGDGPVVTDPK

SEQ ID NO: 5281 - protein, 11 aa, Homo sapiens
TLLLVGSPTWK

SEQ ID NO: 5282 - protein, 11 aa, Homo sapiens
TLLPVSKPEIR

SEQ ID NO: 5283 - protein, 10 aa, Homo sapiens
TLLSNLEEAK

SEQ ID NO: 5284 - protein, 11 aa, Homo sapiens
TLLSNLEEAKK

SEQ ID NO: 5285 - protein, 13 aa, Homo sapiens
TLLVEAEGIEQEK

SEQ ID NO: 5286 - protein, 21 aa, Homo sapiens
TLLVFEVQQPFLFVLWDQQHK

SEQ ID NO: 5287 - protein, 12 aa, Homo sapiens
TLMFGSYLDDEK

SEQ ID NO: 5288 - protein, 27 aa, Homo sapiens
TLMFGSYLDDEKNWGLSFYADKPETTK

SEQ ID NO: 5289 - protein, 12 aa, Homo sapiens
TLMNLGGLAVAR

SEQ ID NO: 5290 - protein, 16 aa, Homo sapiens
TLNAHEHFVTSLDFHK

SEQ ID NO: 5291 - protein, 15 aa, Homo sapiens
TLNDMRQEYEQLIAK

SEQ ID NO: 5292 - protein, 11 aa, Homo sapiens
TLNICEVGTIR

SEQ ID NO: 5293 - protein, 6 aa, Homo sapiens
TLNLAK

SEQ ID NO: 5294 - protein, 27 aa, Homo sapiens
TLNLAQNLLAQLPEELFHPLTSLQTLK

SEQ ID NO: 5295 - protein, 10 aa, Homo sapiens
TLNNDIMLIK

SEQ ID NO: 5296 - protein, 24 aa, Homo sapiens
TLNQPDSQLQLTTGNGLFLSEGLK

SEQ ID NO: 5297 - protein, 16 aa, Homo sapiens
TLPECSKLPNNVLQEK

SEQ ID NO: 5298 - protein, 7 aa, Homo sapiens
TLPRNSK

SEQ ID NO: 5299 - protein, 17 aa, Homo sapiens
TLQALEFHTVPFQLLAR

SEQ ID NO: 5300 - protein, 6 aa, Homo sapiens
TLQELK

SEQ ID NO: 5301 - protein, 7 aa, Homo sapiens
TLQELKK

SEQ ID NO: 5302 - protein, 15 aa, Homo sapiens
TLQGIPQMIGEVIRK

SEQ ID NO: 5303 - protein, 6 aa, Homo sapiens
TLQQIK

SEQ ID NO: 5304 - protein, 14 aa, Homo sapiens
TLQSKPSAPPQDVK

SEQ ID NO: 5305 - protein, 10 aa, Homo sapiens
TLSDVLQYVK

SEQ ID NO: 5306 - protein, 11 aa, Homo sapiens
TLSGTPEESKR

SEQ ID NO: 5307 - protein, 13 aa, Homo sapiens
TLSGTPEVHSNKR

SEQ ID NO: 5308 - protein, 15 aa, Homo sapiens
TLSHPQQMALLDQTK

SEQ ID NO: 5309 - protein, 10 aa, Homo sapiens
TLSPVLESPR

SEQ ID NO: 5310 - protein, 9 aa, Homo sapiens
TLTLLSVTR

SEQ ID NO: 5311 - protein, 35 aa, Homo sapiens
TLTSVSVFVDHHLAPSFYFVAFYYHGDHPVANSLR

SEQ ID NO: 5312 - protein, 8 aa, Homo sapiens
TLVLLMGK

SEQ ID NO: 5313 - protein, 7 aa, Homo sapiens
TLVVHEK

SEQ ID NO: 5314 - protein, 19 aa, Homo sapiens
TLYETEVFSTDFSNISAAK

SEQ ID NO: 5315 - protein, 16 aa, Homo sapiens
TMEQFTIHLTVNPQSK

SEQ ID NO: 5316 - protein, 16 aa, Homo sapiens
TMGYQDFADVVCYTQK

SEQ ID NO: 5317 - protein, 6 aa, Homo sapiens
TMKLIK

SEQ ID NO: 5318 - protein, 16 aa, Homo sapiens
TMLLQPAGSLGSYSYR

SEQ ID NO: 5319 - protein, 23 aa, Homo sapiens
TMQALPYSTVGNSNNYLHLSVLR

SEQ ID NO: 5320 - protein, 11 aa, Homo sapiens
TMQENSTPRED

SEQ ID NO: 5321 - protein, 24 aa, Homo sapiens
TMSGLECQAWDSQSPHAHGYIPSK

SEQ ID NO: 5322 - protein, 15 aa, Homo sapiens
TMTIHNGMFFSTYDR

SEQ ID NO: 5323 - protein, 26 aa, Homo sapiens
TMTIHNGMFFSTYDRDNDGWLTSDPR

SEQ ID NO: 5324 - protein, 11 aa, Homo sapiens
TNAENEFVTIK

SEQ ID NO: 5325 - protein, 12 aa, Homo sapiens
TNAENEFVTIKK

SEQ ID NO: 5326 - protein, 7 aa, Homo sapiens
TNEELLR

SEQ ID NO: 5327 - protein, 11 aa, Homo sapiens
TNFDNDIALVR

SEQ ID NO: 5328 - protein, 5 aa, Homo sapiens
TNIIK

SEQ ID NO: 5329 - protein, 27 aa, Homo sapiens
TNISDEESEQATEMLVHNAQNLMQSVK

SEQ ID NO: 5330 - protein, 11 aa, Homo sapiens
TNLESILSYPK

SEQ ID NO: 5331 - protein, 5 aa, Homo sapiens
TNLLK

SEQ ID NO: 5332 - protein, 12 aa, Homo sapiens
TNLNMPHSLPQR

SEQ ID NO: 5333 - protein, 7 aa, Homo sapiens
TNNHIMK

SEQ ID NO: 5334 - protein, 12 aa, Homo sapiens
TNQVNSGGVLLR

SEQ ID NO: 5335 - protein, 7 aa, Homo sapiens
TNYIGHK

SEQ ID NO: 5336 - protein, 7 aa, Homo sapiens
TPALHFK

SEQ ID NO: 5337 - protein, 10 aa, Homo sapiens
TPEGLTLLFK

SEQ ID NO: 5338 - protein, 8 aa, Homo sapiens
TPENFPCK

SEQ ID NO: 5339 - protein, 22 aa, Homo sapiens
TPEPRPSLSHLLSQYYGAGVAR

SEQ ID NO: 5340 - protein, 39 aa, Homo sapiens
TPFVTHPGYDTGNGIQLPGTSGQQPSVGQQMIFEEHGFR

SEQ ID NO: 5341 - protein, 40 aa, Homo sapiens
TPFVTHPGYDTGNGIQLPGTSGQQPSVGQQMIFEEHGFRR

SEQ ID NO: 5342 - protein, 22 aa, Homo sapiens
TPGAAANLELIFVGPQHAGNYR

SEQ ID NO: 5343 - protein, 32 aa, Homo sapiens
TPGIWLLHCHVTDHIHAGMETTYTVLQNEDTK

SEQ ID NO: 5344 - protein, 12 aa, Homo sapiens
TPHDLFSSGLFR

SEQ ID NO: 5345 - protein, 6 aa, Homo sapiens
TPITFR

SEQ ID NO: 5346 - protein, 7 aa, Homo sapiens
TPITVVK

SEQ ID NO: 5347 - protein, 6 aa, Homo sapiens
TPLVAR

SEQ ID NO: 5348 - protein, 11 aa, Homo sapiens
TPNKIDLYDVR

SEQ ID NO: 5349 - protein, 18 aa, Homo sapiens
TPSAAYLWVGTGASEAEK

SEQ ID NO: 5350 - protein, 10 aa, Homo sapiens
TPWHVTIKPK

SEQ ID NO: 5351 - protein, 15 aa, Homo sapiens
TQAYQDQKPGTSGLR

SEQ ID NO: 5352 - protein, 18 aa, Homo sapiens
TQFNNNEYSQDLDAYNTK

SEQ ID NO: 5353 - protein, 20 aa, Homo sapiens
TQFNNNEYSQDLDAYNTKDK

SEQ ID NO: 5354 - protein, 10 aa, Homo sapiens
TQIDSPLNGK

SEQ ID NO: 5355 - protein, 8 aa, Homo sapiens
TQILSIKK

SEQ ID NO: 5356 - protein, 9 aa, Homo sapiens
TQILVGVNK

SEQ ID NO: 5357 - protein, 25 aa, Homo sapiens
TQILVGVNKDEGTAFLVYGAPGFSK

SEQ ID NO: 5358 - protein, 9 aa, Homo sapiens
TQLVSNLKK

SEQ ID NO: 5359 - protein, 13 aa, Homo sapiens
TQNLAALLHAIAR

SEQ ID NO: 5360 - protein, 17 aa, Homo sapiens
TQPNLDNCPFHDQPHLK

SEQ ID NO: 5361 - protein, 17 aa, Homo sapiens
TQSGLQSYLLQFHGLVR

SEQ ID NO: 5362 - protein, 7 aa, Homo sapiens
TQVADAK

SEQ ID NO: 5363 - protein, 8 aa, Homo sapiens
TQVNRLGR

SEQ ID NO: 5364 - protein, 11 aa, Homo sapiens
TQVSTQAEQLR

SEQ ID NO: 5365 - protein, 12 aa, Homo sapiens
TQVSTQAEQLRR

SEQ ID NO: 5366 - protein, 8 aa, Homo sapiens
TQWIHFFK

SEQ ID NO: 5367 - protein, 11 aa, Homo sapiens
TRLEQEIATYR

SEQ ID NO: 5368 - protein, 15 aa, Homo sapiens
TRPVVAAGAVGLAQR

SEQ ID NO: 5369 - protein, 7 aa, Homo sapiens
TSALSAK

SEQ ID NO: 5370 - protein, 12 aa, Homo sapiens
TSAPPSRPPPPR

SEQ ID NO: 5371 - protein, 9 aa, Homo sapiens
TSCLLFMGR

SEQ ID NO: 5372 - protein, 6 aa, Homo sapiens
TSDFLK

SEQ ID NO: 5373 - protein, 11 aa, Homo sapiens
TSDQIHFFFAK

SEQ ID NO: 5374 - protein, 15 aa, Homo sapiens
TSDQIHFFFAKLNCR

SEQ ID NO: 5375 - protein, 22 aa, Homo sapiens
TSESGELHGLTTEEEFVEGIYK

SEQ ID NO: 5376 - protein, 28 aa, Homo sapiens
TSESGELHGLTTEEEFVEGIYKVEIDTK

SEQ ID NO: 5377 - protein, 10 aa, Homo sapiens
TSESGLPSTR

SEQ ID NO: 5378 - protein, 26 aa, Homo sapiens
TSESGTPSSSTPQENTISGYSLLTCK

SEQ ID NO: 5379 - protein, 23 aa, Homo sapiens
TSETKHDTSLKPISVSYNPATAK

SEQ ID NO: 5380 - protein, 11 aa, Homo sapiens
TSGVHDGSLHK

SEQ ID NO: 5381 - protein, 12 aa, Homo sapiens
TSLEDFYLDEER

SEQ ID NO: 5382 - protein, 17 aa, Homo sapiens
TSLEVSPNPEPPEKPVR

SEQ ID NO: 5383 - protein, 11 aa, Homo sapiens
TSLQVPMMHQK

SEQ ID NO: 5384 - protein, 9 aa, Homo sapiens
TSLTVVLLR

SEQ ID NO: 5385 - protein, 11 aa, Homo sapiens
TSNFNAAISLK

SEQ ID NO: 5386 - protein, 26 aa, Homo sapiens
TSNPYRVPANLENVGFEVQTAEDDLK

SEQ ID NO: 5387 - protein, 7 aa, Homo sapiens
TSPVDEK

SEQ ID NO: 5388 - protein, 9 aa, Homo sapiens
TSQDPLMIK

SEQ ID NO: 5389 - protein, 15 aa, Homo sapiens
TSSFALNLPTLPEVK

SEQ ID NO: 5390 - protein, 24 aa, Homo sapiens
TSSFALNLPTLPEVKFPEVDVLTK

SEQ ID NO: 5391 - protein, 8 aa, Homo sapiens
TSSSFEVR

SEQ ID NO: 5392 - protein, 10 aa, Homo sapiens
TSTADYAMFK

SEQ ID NO: 5393 - protein, 9 aa, Homo sapiens
TSTPEDFIR

SEQ ID NO: 5394 - protein, 13 aa, Homo sapiens
TSTSEEVCSFYLK

SEQ ID NO: 5395 - protein, 12 aa, Homo sapiens
TTDVTQTFGIEK

SEQ ID NO: 5396 - protein, 6 aa, Homo sapiens
TTFDPK

SEQ ID NO: 5397 - protein, 7 aa, Homo sapiens
TTFDPKK

SEQ ID NO: 5398 - protein, 30 aa, Homo sapiens
TTGIVMDSGDGVTHTVPIYEGYALPHAILR

SEQ ID NO: 5399 - protein, 5 aa, Homo sapiens
TTIEK

SEQ ID NO: 5400 - protein, 17 aa, Homo sapiens
TTIEKPVWLGFLGPIIK

SEQ ID NO: 5401 - protein, 14 aa, Homo sapiens
TTKPYPADIVVQFK

SEQ ID NO: 5402 - protein, 5 aa, Homo sapiens
TTLEK

SEQ ID NO: 5403 - protein, 12 aa, Homo sapiens
TTLLAGDIEHPR

SEQ ID NO: 5404 - protein, 21 aa, Homo sapiens
TTLTAFGFASADLIEIGLEGK

SEQ ID NO: 5405 - protein, 10 aa, Homo sapiens
TTMKIIPFNR

SEQ ID NO: 5406 - protein, 14 aa, Homo sapiens
TTNIQGINLLFSSR

SEQ ID NO: 5407 - protein, 15 aa, Homo sapiens
TTNIQGINLLFSSRR

SEQ ID NO: 5408 - protein, 15 aa, Homo sapiens
TTPKDFYVDENTTVR

SEQ ID NO: 5409 - protein, 8 aa, Homo sapiens
TTSGIHPK

SEQ ID NO: 5410 - protein, 6 aa, Homo sapiens
TTVMVK

SEQ ID NO: 5411 - protein, 18 aa, Homo sapiens
TTVMVKNEDSLVFVQTDK

SEQ ID NO: 5412 - protein, 11 aa, Homo sapiens
TVAACNLPIVR

SEQ ID NO: 5413 - protein, 14 aa, Homo sapiens
TVAAGALASLSHLK

SEQ ID NO: 5414 - protein, 20 aa, Homo sapiens
TVAILLKDDYFVSGAGLPGR

SEQ ID NO: 5415 - protein, 13 aa, Homo sapiens
TVEAEAAHGTVTR

SEQ ID NO: 5416 - protein, 9 aa, Homo sapiens
TVESITDIR

SEQ ID NO: 5417 - protein, 11 aa, Homo sapiens
TVFGTEPDMIR

SEQ ID NO: 5418 - protein, 11 aa, Homo sapiens
TVGSDTFYSFK

SEQ ID NO: 5419 - protein, 15 aa, Homo sapiens
TVGSDTFYSFKYEIK

SEQ ID NO: 5420 - protein, 8 aa, Homo sapiens
TVIEVDER

SEQ ID NO: 5421 - protein, 9 aa, Homo sapiens
TVIGPDGHK

SEQ ID NO: 5422 - protein, 13 aa, Homo sapiens
TVIGPDGHKEVTK

SEQ ID NO: 5423 - protein, 6 aa, Homo sapiens
TVIPGR

SEQ ID NO: 5424 - protein, 9 aa, Homo sapiens
TVISQSLSK

SEQ ID NO: 5425 - protein, 15 aa, Homo sapiens
TVMVNIENPEGIPVK

SEQ ID NO: 5426 - protein, 7 aa, Homo sapiens
TVPVPEK

SEQ ID NO: 5427 - protein, 10 aa, Homo sapiens
TVQAVLTVPK

SEQ ID NO: 5428 - protein, 7 aa, Homo sapiens
TVSDSIK

SEQ ID NO: 5429 - protein, 8 aa, Homo sapiens
TVSDSIKK

SEQ ID NO: 5430 - protein, 6 aa, Homo sapiens
TVVLQK

SEQ ID NO: 5431 - protein, 9 aa, Homo sapiens
TVVTMASAR

SEQ ID NO: 5432 - protein, 11 aa, Homo sapiens
TVWSAHSGPTR

SEQ ID NO: 5433 - protein, 10 aa, Homo sapiens
TWKPTLVILR

SEQ ID NO: 5434 - protein, 12 aa, Homo sapiens
TWPSSHNWFFAK

SEQ ID NO: 5435 - protein, 8 aa, Homo sapiens
TWQDCEYK

SEQ ID NO: 5436 - protein, 6 aa, Homo sapiens
TWQDYK

SEQ ID NO: 5437 - protein, 11 aa, Homo sapiens
TWRNDLISATK

SEQ ID NO: 5438 - protein, 8 aa, Homo sapiens
TWYPEVPK

SEQ ID NO: 5439 - protein, 10 aa, Homo sapiens
TYAMGHLIQR

SEQ ID NO: 5440 - protein, 8 aa, Homo sapiens
TYCSEPEK

SEQ ID NO: 5441 - protein, 11 aa, Homo sapiens
TYCSEPEKVDK

SEQ ID NO: 5442 - protein, 8 aa, Homo sapiens
TYETTLEK

SEQ ID NO: 5443 - protein, 5 aa, Homo sapiens
TYFGK

SEQ ID NO: 5444 - protein, 16 aa, Homo sapiens
TYFPHFDLSHGSAQVK

SEQ ID NO: 5445 - protein, 19 aa, Homo sapiens
TYGADLASVDFQHASEDAR

SEQ ID NO: 5446 - protein, 10 aa, Homo sapiens
TYGVSFFLVK

SEQ ID NO: 5447 - protein, 10 aa, Homo sapiens
TYHVGEQWQK

SEQ ID NO: 5448 - protein, 28 aa, Homo sapiens
TYIYDHGFPYTDPVGVLYEDGDDTVATR

SEQ ID NO: 5449 - protein, 5 aa, Homo sapiens
TYLFK

SEQ ID NO: 5450 - protein, 9 aa, Homo sapiens
TYLPAVDEK

SEQ ID NO: 5451 - protein, 12 aa, Homo sapiens
TYMLAFDVNDEK

SEQ ID NO: 5452 - protein, 27 aa, Homo sapiens
TYMLAFDVNDEKNWGLSVYADKPETTK

SEQ ID NO: 5453 - protein, 8 aa, Homo sapiens
TYNVLDMK

SEQ ID NO: 5454 - protein, 8 aa, Homo sapiens
TYQEVAQK

SEQ ID NO: 5455 - protein, 8 aa, Homo sapiens
TYSDHPEK

SEQ ID NO: 5456 - protein, 15 aa, Homo sapiens
TYSTSFTPMYHAVTK

SEQ ID NO: 5457 - protein, 11 aa, Homo sapiens
TYSVEYLDSSK

SEQ ID NO: 5458 - protein, 17 aa, Homo sapiens
TYYIAAVEVEWDYSPQR

SEQ ID NO: 5459 - protein, 21 aa, Homo sapiens
TYYIAAVEVEWDYSPQREWEK

SEQ ID NO: 5460 - protein, 10 aa, Homo sapiens
VAAGAFQGLR

SEQ ID NO: 5461 - protein, 8 aa, Homo sapiens
VAAQNSDK

SEQ ID NO: 5462 - protein, 9 aa, Homo sapiens
VAAYDKLEK

SEQ ID NO: 5463 - protein, 19 aa, Homo sapiens
VACEEPPFIENGAANLHSK

SEQ ID NO: 5464 - protein, 29 aa, Homo sapiens
VADALTNAVAHVDDMPNALSALSDLHAHK

SEQ ID NO: 5465 - protein, 13 aa, Homo sapiens
VAEGTQVLELPFK

SEQ ID NO: 5466 - protein, 28 aa, Homo sapiens
VAEGTQVLELPFKGDDITMVLILPKPEK

SEQ ID NO: 5467 - protein, 11 aa, Homo sapiens
VAEYMDWILEK

SEQ ID NO: 5468 - protein, 15 aa, Homo sapiens
VAFLTVTLHQGGATR

SEQ ID NO: 5469 - protein, 10 aa, Homo sapiens
VAFPLEVVQK

SEQ ID NO: 5470 - protein, 10 aa, Homo sapiens
VAGGRAAALR

SEQ ID NO: 5471 - protein, 14 aa, Homo sapiens
VAHEINHGIGQAGK

SEQ ID NO: 5472 - protein, 9 aa, Homo sapiens
VAHQLQALR

SEQ ID NO: 5473 - protein, 8 aa, Homo sapiens
VAIIIPFR

SEQ ID NO: 5474 - protein, 8 aa, Homo sapiens
VAILIPFR

SEQ ID NO: 5475 - protein, 9 aa, Homo sapiens
VAIVVGAPR

SEQ ID NO: 5476 - protein, 7 aa, Homo sapiens
VALTEDR

SEQ ID NO: 5477 - protein, 18 aa, Homo sapiens
VALVTFNSAAHNKPSLIR

SEQ ID NO: 5478 - protein, 7 aa, Homo sapiens
VANPCVK

SEQ ID NO: 5479 - protein, 6 aa, Homo sapiens
VANPSR

SEQ ID NO: 5480 - protein, 22 aa, Homo sapiens
VANYFDWISYHVGRPFISQYNV

SEQ ID NO: 5481 - protein, 13 aa, Homo sapiens
VAPAPARPSGPSK

SEQ ID NO: 5482 - protein, 18 aa, Homo sapiens
VAPEEHPVLLTEAPLNPK

SEQ ID NO: 5483 - protein, 24 aa, Homo sapiens
VAQLEAQCQEPCKDTVQIHDITGK

SEQ ID NO: 5484 - protein, 23 aa, Homo sapiens
VAQVIIPSTYVPGTTNHDIALLR

SEQ ID NO: 5485 - protein, 9 aa, Homo sapiens
VASYGVKPR

SEQ ID NO: 5486 - protein, 8 aa, Homo sapiens
VATTVISK

SEQ ID NO: 5487 - protein, 12 aa, Homo sapiens
VAVIVSNDHAGK

SEQ ID NO: 5488 - protein, 14 aa, Homo sapiens
VAVNDAHLLQYNHR

SEQ ID NO: 5489 - protein, 17 aa, Homo sapiens
VAVVEYHDGSHAYIGLK

SEQ ID NO: 5490 - protein, 16 aa, Homo sapiens
VAVVQYSGTGQQRPER

SEQ ID NO: 5491 - protein, 9 aa, Homo sapiens
VAWHYDEEK

SEQ ID NO: 5492 - protein, 23 aa, Homo sapiens
VAWHYDEEKIEFEWNTGTNVDTK

SEQ ID NO: 5493 - protein, 10 aa, Homo sapiens
VAYDLVYYVR

SEQ ID NO: 5494 - protein, 11 aa, Homo sapiens
VCNRYEFLNGR

SEQ ID NO: 5495 - protein, 14 aa, Homo sapiens
VCPFAGILENGAVR

SEQ ID NO: 5496 - protein, 11 aa, Homo sapiens
VCSQYAAYGEK

SEQ ID NO: 5497 - protein, 10 aa, Homo sapiens
VCSSPPIHMK

SEQ ID NO: 5498 - protein, 6 aa, Homo sapiens
VDEVIK

SEQ ID NO: 5499 - protein, 9 aa, Homo sapiens
VDFTLSSER

SEQ ID NO: 5500 - protein, 21 aa, Homo sapiens
VDFTLSSERDFALLSLQVPLK

SEQ ID NO: 5501 - protein, 9 aa, Homo sapiens
VDGALCMEK

SEQ ID NO: 5502 - protein, 10 aa, Homo sapiens
VDGAVSSWFR

SEQ ID NO: 5503 - protein, 12 aa, Homo sapiens
VDHHTDKYENNK

SEQ ID NO: 5504 - protein, 18 aa, Homo sapiens
VDKDLQSLEDILHQVENK

SEQ ID NO: 5505 - protein, 13 aa, Homo sapiens
VDKDNEDFQESNR

SEQ ID NO: 5506 - protein, 12 aa, Homo sapiens
VDLLNQEIEFLK

SEQ ID NO: 5507 - protein, 31 aa, Homo sapiens
VDLSFSPAQSPPASHAHLQVAAAPQSLCALR

SEQ ID NO: 5508 - protein, 19 aa, Homo sapiens
VDLSFSPSQSLPASHAHLR

SEQ ID NO: 5509 - protein, 14 aa, Homo sapiens
VDLVDFEDNYQFAK

SEQ ID NO: 5510 - protein, 9 aa, Homo sapiens
VDPEIQNVK

SEQ ID NO: 5511 - protein, 7 aa, Homo sapiens
VDPVNFK

SEQ ID NO: 5512 - protein, 5 aa, Homo sapiens
VDQLK

SEQ ID NO: 5513 - protein, 24 aa, Homo sapiens
VDRDVAPGTLCDVAGWGIVNHAGR

SEQ ID NO: 5514 - protein, 22 aa, Homo sapiens
VDRPFHFMIYEETSGMLLFLGR

SEQ ID NO: 5515 - protein, 6 aa, Homo sapiens
VDSHFR

SEQ ID NO: 5516 - protein, 10 aa, Homo sapiens
VDTVDPPYPR

SEQ ID NO: 5517 - protein, 15 aa, Homo sapiens
VDVIPVNLPGEHGQR

SEQ ID NO: 5518 - protein, 11 aa, Homo sapiens
VDVQAGACEGK

SEQ ID NO: 5519 - protein, 20 aa, Homo sapiens
VDVQAGACEGKLELSVDGAK

SEQ ID NO: 5520 - protein, 15 aa, Homo sapiens
VEADIPGHGQEVLIR

SEQ ID NO: 5521 - protein, 7 aa, Homo sapiens
VEASISK

SEQ ID NO: 5522 - protein, 8 aa, Homo sapiens
VEDIPLAR

SEQ ID NO: 5523 - protein, 8 aa, Homo sapiens
VEEEAAQK

SEQ ID NO: 5524 - protein, 6 aa, Homo sapiens
VEEVTK

SEQ ID NO: 5525 - protein, 14 aa, Homo sapiens
VEFLRPSFTDGTIR

SEQ ID NO: 5526 - protein, 6 aa, Homo sapiens
VEFVLK

SEQ ID NO: 5527 - protein, 15 aa, Homo sapiens
VEGLTFQQNSLNWMK

SEQ ID NO: 5528 - protein, 13 aa, Homo sapiens
VEHGSVALPAIMR

SEQ ID NO: 5529 - protein, 10 aa, Homo sapiens
VEHSDLSFSK

SEQ ID NO: 5530 - protein, 6 aa, Homo sapiens
VEIDTK

SEQ ID NO: 5531 - protein, 6 aa, Homo sapiens
VEIEAK

SEQ ID NO: 5532 - protein, 6 aa, Homo sapiens
VEIFYR

SEQ ID NO: 5533 - protein, 27 aa, Homo sapiens
VEKFDLVPVPTNLYGDFFTGDAYVILK

SEQ ID NO: 5534 - protein, 24 aa, Homo sapiens
VEKPTADAEAYVFTPNMICAGGEK

SEQ ID NO: 5535 - protein, 14 aa, Homo sapiens
VELAPLPSWQPVGK

SEQ ID NO: 5536 - protein, 6 aa, Homo sapiens
VELEAK

SEQ ID NO: 5537 - protein, 10 aa, Homo sapiens
VELEDFNGNR

SEQ ID NO: 5538 - protein, 18 aa, Homo sapiens
VELEDWAGNEAYAEYHFR

SEQ ID NO: 5539 - protein, 9 aa, Homo sapiens
VELEDWNGR

SEQ ID NO: 5540 - protein, 19 aa, Homo sapiens
VELEDWNGRTSTADYAMFK

SEQ ID NO: 5541 - protein, 16 aa, Homo sapiens
VELLHNPAFCSLATTK

SEQ ID NO: 5542 - protein, 7 aa, Homo sapiens
VELTPLK

SEQ ID NO: 5543 - protein, 5 aa, Homo sapiens
VEPLR

SEQ ID NO: 5544 - protein, 13 aa, Homo sapiens
VEPLRAELQEGAR

SEQ ID NO: 5545 - protein, 20 aa, Homo sapiens
VEPLYELVTATDFAYSSTVR

SEQ ID NO: 5546 - protein, 10 aa, Homo sapiens
VEPYGENFNK

SEQ ID NO: 5547 - protein, 6 aa, Homo sapiens
VESEIK

SEQ ID NO: 5548 - protein, 28 aa, Homo sapiens
VETNMAFSPFSIASLLTQVLLGAGENTK

SEQ ID NO: 5549 - protein, 7 aa, Homo sapiens
VEVEAGK

SEQ ID NO: 5550 - protein, 6 aa, Homo sapiens
VEVEQK

SEQ ID NO: 5551 - protein, 34 aa, Homo sapiens
VEYELSEEGDEPQYLDLPSTATSVNIPDLLPGRK

SEQ ID NO: 5552 - protein, 8 aa, Homo sapiens
VEYGFQVK

SEQ ID NO: 5553 - protein, 11 aa, Homo sapiens
VEYGFQVKVLR

SEQ ID NO: 5554 - protein, 6 aa, Homo sapiens
VFAKPK

SEQ ID NO: 5555 - protein, 7 aa, Homo sapiens
VFALDQK

SEQ ID NO: 5556 - protein, 8 aa, Homo sapiens
VFAVSHGR

SEQ ID NO: 5557 - protein, 8 aa, Homo sapiens
VFCQPWQR

SEQ ID NO: 5558 - protein, 17 aa, Homo sapiens
VFDEFKPLVEEPQNLIK

SEQ ID NO: 5559 - protein, 8 aa, Homo sapiens
VFEHIGKK

SEQ ID NO: 5560 - protein, 9 aa, Homo sapiens
VFEVHVRPK

SEQ ID NO: 5561 - protein, 7 aa, Homo sapiens
VFFASWR

SEQ ID NO: 5562 - protein, 6 aa, Homo sapiens
VFGALK

SEQ ID NO: 5563 - protein, 22 aa, Homo sapiens
VFHLLGVDTLVVTNAAGGLNPK

SEQ ID NO: 5564 - protein, 7 aa, Homo sapiens
VFHSLAK

SEQ ID NO: 5565 - protein, 11 aa, Homo sapiens
VFIPHGLIMDR

SEQ ID NO: 5566 - protein, 17 aa, Homo sapiens
VFKDVFLEMNIPYSVVR

SEQ ID NO: 5567 - protein, 13 aa, Homo sapiens
VFLQNLLSVSQAR

SEQ ID NO: 5568 - protein, 6 aa, Homo sapiens
VFNDMK

SEQ ID NO: 5569 - protein, 5 aa, Homo sapiens
VFNPR

SEQ ID NO: 5570 - protein, 15 aa, Homo sapiens
VFPGGSHTYVWQVLK

SEQ ID NO: 5571 - protein, 7 aa, Homo sapiens
VFQFLEK

SEQ ID NO: 5572 - protein, 5 aa, Homo sapiens
VFQLK

SEQ ID NO: 5573 - protein, 6 aa, Homo sapiens
VFQLKR

SEQ ID NO: 5574 - protein, 21 aa, Homo sapiens
VFQSLPHENKPLTLSNYQTNK

SEQ ID NO: 5575 - protein, 17 aa, Homo sapiens
VFQYIDLHQDEFVQTLK

SEQ ID NO: 5576 - protein, 10 aa, Homo sapiens
VFREFHLHLR

SEQ ID NO: 5577 - protein, 7 aa, Homo sapiens
VFSGDGK

SEQ ID NO: 5578 - protein, 11 aa, Homo sapiens
VFSGDGKDFYR

SEQ ID NO: 5579 - protein, 8 aa, Homo sapiens
VFSIPFHK

SEQ ID NO: 5580 - protein, 10 aa, Homo sapiens
VFSLQWGEVK

SEQ ID NO: 5581 - protein, 18 aa, Homo sapiens
VFSNGADLSGVTEEAPLK

SEQ ID NO: 5582 - protein, 21 aa, Homo sapiens
VFSNGADLSGVTEEAPLKLSK

SEQ ID NO: 5583 - protein, 14 aa, Homo sapiens
VFVDGHQLFDFYHR

SEQ ID NO: 5584 - protein, 6 aa, Homo sapiens
VFVFPR

SEQ ID NO: 5585 - protein, 5 aa, Homo sapiens
VFYLK

SEQ ID NO: 5586 - protein, 15 aa, Homo sapiens
VGAHAGEYGAEALER

SEQ ID NO: 5587 - protein, 5 aa, Homo sapiens
VGAVK

SEQ ID NO: 5588 - protein, 18 aa, Homo sapiens
VGDAIPAVEVFEGEPGNK

SEQ ID NO: 5589 - protein, 23 aa, Homo sapiens
VGDRNTEQEEGGEAVHEVEVVIK

SEQ ID NO: 5590 - protein, 10 aa, Homo sapiens
VGDTLNLNLR

SEQ ID NO: 5591 - protein, 9 aa, Homo sapiens
VGDTYERPK

SEQ ID NO: 5592 - protein, 9 aa, Homo sapiens
VGEFSGANK

SEQ ID NO: 5593 - protein, 6 aa, Homo sapiens
VGEVLK

SEQ ID NO: 5594 - protein, 10 aa, Homo sapiens
VGEYSLYIGR

SEQ ID NO: 5595 - protein, 16 aa, Homo sapiens
VGFLKPVGPKPINLPK

SEQ ID NO: 5596 - protein, 11 aa, Homo sapiens
VGFYESDVMGR

SEQ ID NO: 5597 - protein, 17 aa, Homo sapiens
VGGHLRPGIVQSGGVVR

SEQ ID NO: 5598 - protein, 10 aa, Homo sapiens
VGGNSKGTLK

SEQ ID NO: 5599 - protein, 11 aa, Homo sapiens
VGIVAWHPTAR

SEQ ID NO: 5600 - protein, 24 aa, Homo sapiens
VGLFNAELLEALLNYYILNTFYPK

SEQ ID NO: 5601 - protein, 18 aa, Homo sapiens
VGLNELYNGQILETIGGK

SEQ ID NO: 5602 - protein, 12 aa, Homo sapiens
VGLSDAFVVVHR

SEQ ID NO: 5603 - protein, 21 aa, Homo sapiens
VGLSGMAIADVTLLSGFHALR

SEQ ID NO: 5604 - protein, 7 aa, Homo sapiens
VGPEADK

SEQ ID NO: 5605 - protein, 9 aa, Homo sapiens
VGPEADKYR

SEQ ID NO: 5606 - protein, 21 aa, Homo sapiens
VGQLQLSHNLSLVILVPQNLK

SEQ ID NO: 5607 - protein, 10 aa, Homo sapiens
VGSAKPGLQK

SEQ ID NO: 5608 - protein, 12 aa, Homo sapiens
VGSALFLSHNLK

SEQ ID NO: 5609 - protein, 16 aa, Homo sapiens
VGSALFLSHNLKFLAK

SEQ ID NO: 5610 - protein, 9 aa, Homo sapiens
VGSAMVNAK

SEQ ID NO: 5611 - protein, 17 aa, Homo sapiens
VGSPNAAVLWLWSSHNR

SEQ ID NO: 5612 - protein, 12 aa, Homo sapiens
VGWEQLLTTIAR

SEQ ID NO: 5613 - protein, 14 aa, Homo sapiens
VGYVSGWGQSDNFK

SEQ ID NO: 5614 - protein, 9 aa, Homo sapiens
VGYVSGWGR

SEQ ID NO: 5615 - protein, 14 aa, Homo sapiens
VGYVSGWGRNANFK

SEQ ID NO: 5616 - protein, 27 aa, Homo sapiens
VHANPLLIDVVTYLVALIPEPSAQQLR

SEQ ID NO: 5617 - protein, 10 aa, Homo sapiens
VHAYIISSLK

SEQ ID NO: 5618 - protein, 11 aa, Homo sapiens
VHAYIISSLKK

SEQ ID NO: 5619 - protein, 14 aa, Homo sapiens
VHDVNDNWPVFTHR

SEQ ID NO: 5620 - protein, 16 aa, Homo sapiens
VHGPGIQSGTTNKPNK

SEQ ID NO: 5621 - protein, 22 aa, Homo sapiens
VHIQSSQTVESSGLYTLQSILK

SEQ ID NO: 5622 - protein, 10 aa, Homo sapiens
VHLIVQVSPK

SEQ ID NO: 5623 - protein, 8 aa, Homo sapiens
VHLTPEEK

SEQ ID NO: 5624 - protein, 12 aa, Homo sapiens
VHLVGIDIFTGK

SEQ ID NO: 5625 - protein, 15 aa, Homo sapiens
VHLVVFNNLQLADGR

SEQ ID NO: 5626 - protein, 16 aa, Homo sapiens
VHLVVFNNLQLADGRR

SEQ ID NO: 5627 - protein, 9 aa, Homo sapiens
VHPVSTMIK

SEQ ID NO: 5628 - protein, 16 aa, Homo sapiens
VHQYFNVELIQPGAVK

SEQ ID NO: 5629 - protein, 8 aa, Homo sapiens
VHSFPTLK

SEQ ID NO: 5630 - protein, 8 aa, Homo sapiens
VHSIFPAR

SEQ ID NO: 5631 - protein, 20 aa, Homo sapiens
VHSPSGALEECYVTEIDQDK

SEQ ID NO: 5632 - protein, 8 aa, Homo sapiens
VHVIFNYK

SEQ ID NO: 5633 - protein, 32 aa, Homo sapiens
VHVSEEGTEPEAMLQVLGPKPALPAGTEDTAK

SEQ ID NO: 5634 - protein, 38 aa, Homo sapiens
VHVSEEGTEPEAMLQVLGPKPALPAGTEDTAKEDAANR

SEQ ID NO: 5635 - protein, 9 aa, Homo sapiens
VHYTVCIWR

SEQ ID NO: 5636 - protein, 7 aa, Homo sapiens
VIADNVK

SEQ ID NO: 5637 - protein, 5 aa, Homo sapiens
VIATR

SEQ ID NO: 5638 - protein, 6 aa, Homo sapiens
VIDAVR

SEQ ID NO: 5639 - protein, 6 aa, Homo sapiens
VIDITR

SEQ ID NO: 5640 - protein, 6 aa, Homo sapiens
VIDLTR

SEQ ID NO: 5641 - protein, 15 aa, Homo sapiens
VIEHIMEDLDTNADK

SEQ ID NO: 5642 - protein, 13 aa, Homo sapiens
VIEKVQHIQLLQK

SEQ ID NO: 5643 - protein, 8 aa, Homo sapiens
VIFGLFGK

SEQ ID NO: 5644 - protein, 5 aa, Homo sapiens
VIFIR

SEQ ID NO: 5645 - protein, 17 aa, Homo sapiens
VIGNMGQTMEQLTPELK

SEQ ID NO: 5646 - protein, 6 aa, Homo sapiens
VIGTLK

SEQ ID NO: 5647 - protein, 24 aa, Homo sapiens
VIHDNFGIVEGLMTTVHAITATQK

SEQ ID NO: 5648 - protein, 22 aa, Homo sapiens
VILGAHQEVNLEPHVQEIEVSR

SEQ ID NO: 5649 - protein, 6 aa, Homo sapiens
VILHLK

SEQ ID NO: 5650 - protein, 9 aa, Homo sapiens
VINMSYHPR

SEQ ID NO: 5651 - protein, 5 aa, Homo sapiens
VINTK

SEQ ID NO: 5652 - protein, 13 aa, Homo sapiens
VIQYLAYVASSHK

SEQ ID NO: 5653 - protein, 8 aa, Homo sapiens
VISFHVTR

SEQ ID NO: 5654 - protein, 15 aa, Homo sapiens
VIVIPVGIGPHANLK

SEQ ID NO: 5655 - protein, 9 aa, Homo sapiens
VIVVSMNYR

SEQ ID NO: 5656 - protein, 8 aa, Homo sapiens
VIYTQLSK

SEQ ID NO: 5657 - protein, 11 aa, Homo sapiens
VKADQDSEAMK

SEQ ID NO: 5658 - protein, 16 aa, Homo sapiens
VKAHYGGFTVQNEANK

SEQ ID NO: 5659 - protein, 11 aa, Homo sapiens
VKDISEVVTPR

SEQ ID NO: 5660 - protein, 13 aa, Homo sapiens
VKDLATVYVDVLK

SEQ ID NO: 5661 - protein, 14 aa, Homo sapiens
VKEEIIEAFVQELR

SEQ ID NO: 5662 - protein, 10 aa, Homo sapiens
VKEEVFIQQR

SEQ ID NO: 5663 - protein, 7 aa, Homo sapiens
VKENFDK

SEQ ID NO: 5664 - protein, 11 aa, Homo sapiens
VKIDQTVEELR

SEQ ID NO: 5665 - protein, 6 aa, Homo sapiens
VKIEQK

SEQ ID NO: 5666 - protein, 6 aa, Homo sapiens
VKIIFK

SEQ ID NO: 5667 - protein, 6 aa, Homo sapiens
VKIQEK

SEQ ID NO: 5668 - protein, 12 aa, Homo sapiens
VKLIANTLCNSR

SEQ ID NO: 5669 - protein, 9 aa, Homo sapiens
VKPLLQVSR

SEQ ID NO: 5670 - protein, 9 aa, Homo sapiens
VKPVLMNSK

SEQ ID NO: 5671 - protein, 6 aa, Homo sapiens
VKVELK

SEQ ID NO: 5672 - protein, 22 aa, Homo sapiens
VKVEPLYELVTATDFAYSSTVR

SEQ ID NO: 5673 - protein, 11 aa, Homo sapiens
VKVEPSHDASK

SEQ ID NO: 5674 - protein, 27 aa, Homo sapiens
VKWYLFGMGNEVDVHAAFFHGQALTNK

SEQ ID NO: 5675 - protein, 12 aa, Homo sapiens
VLADKFIIPGLK

SEQ ID NO: 5676 - protein, 13 aa, Homo sapiens
VLAKPQNTAEVQK

SEQ ID NO: 5677 - protein, 7 aa, Homo sapiens
VLAQLLR

SEQ ID NO: 5678 - protein, 5 aa, Homo sapiens
VLATR

SEQ ID NO: 5679 - protein, 9 aa, Homo sapiens
VLDALQAIK

SEQ ID NO: 5680 - protein, 6 aa, Homo sapiens
VLDAVR

SEQ ID NO: 5681 - protein, 9 aa, Homo sapiens
VLDELTLTK

SEQ ID NO: 5682 - protein, 16 aa, Homo sapiens
VLDFEHFLPMLQTVAK

SEQ ID NO: 5683 - protein, 6 aa, Homo sapiens
VLDLTR

SEQ ID NO: 5684 - protein, 10 aa, Homo sapiens
VLEDNSALDK

SEQ ID NO: 5685 - protein, 10 aa, Homo sapiens
VLEDRPLSDK

SEQ ID NO: 5686 - protein, 8 aa, Homo sapiens
VLEDSDLK

SEQ ID NO: 5687 - protein, 8 aa, Homo sapiens
VLEEEEQR

SEQ ID NO: 5688 - protein, 7 aa, Homo sapiens
VLEELHK

SEQ ID NO: 5689 - protein, 6 aa, Homo sapiens
VLEIQK

SEQ ID NO: 5690 - protein, 6 aa, Homo sapiens
VLELEK

SEQ ID NO: 5691 - protein, 7 aa, Homo sapiens
VLEPTLK

SEQ ID NO: 5692 - protein, 5 aa, Homo sapiens
VLFAK

SEQ ID NO: 5693 - protein, 5 aa, Homo sapiens
VLFLR

SEQ ID NO: 5694 - protein, 9 aa, Homo sapiens
VLFYVDSEK

SEQ ID NO: 5695 - protein, 11 aa, Homo sapiens
VLFYVDSEKLK

SEQ ID NO: 5696 - protein, 16 aa, Homo sapiens
VLGAFSDGLAHLDNLK

SEQ ID NO: 5697 - protein, 7 aa, Homo sapiens
VLGQVNK

SEQ ID NO: 5698 - protein, 12 aa, Homo sapiens
VLHGDLIDFVCK

SEQ ID NO: 5699 - protein, 14 aa, Homo sapiens
VLHPLEGAVVIIFK

SEQ ID NO: 5700 - protein, 15 aa, Homo sapiens
VLHPLEGAVVIIFKK

SEQ ID NO: 5701 - protein, 11 aa, Homo sapiens
VLIAAHGNSLR

SEQ ID NO: 5702 - protein, 17 aa, Homo sapiens
VLIFQEENEIPASVFVK

SEQ ID NO: 5703 - protein, 9 aa, Homo sapiens
VLIFSQMVR

SEQ ID NO: 5704 - protein, 31 aa, Homo sapiens
VLKDQVNTFDNIFIAPVGISTAMGMISLGLK

SEQ ID NO: 5705 - protein, 10 aa, Homo sapiens
VLLDGVQNPR

SEQ ID NO: 5706 - protein, 17 aa, Homo sapiens
VLLESIGSHEELTQDSR

SEQ ID NO: 5707 - protein, 8 aa, Homo sapiens
VLLHFVQK

SEQ ID NO: 5708 - protein, 6 aa, Homo sapiens
VLLQGK

SEQ ID NO: 5709 - protein, 21 aa, Homo sapiens
VLLTRPGEGGTGLPGPPLITR

SEQ ID NO: 5710 - protein, 13 aa, Homo sapiens
VLLYMAFMTIMIK

SEQ ID NO: 5711 - protein, 11 aa, Homo sapiens
VLMSVLNDNSR

SEQ ID NO: 5712 - protein, 7 aa, Homo sapiens
VLNILEK

SEQ ID NO: 5713 - protein, 11 aa, Homo sapiens
VLNQQLTNHIR

SEQ ID NO: 5714 - protein, 10 aa, Homo sapiens
VLNTEANVVR

SEQ ID NO: 5715 - protein, 5 aa, Homo sapiens
VLNTK

SEQ ID NO: 5716 - protein, 9 aa, Homo sapiens
VLNYVDWIK

SEQ ID NO: 5717 - protein, 10 aa, Homo sapiens
VLNYVDWIKK

SEQ ID NO: 5718 - protein, 10 aa, Homo sapiens
VLPGHSAGPR

SEQ ID NO: 5719 - protein, 18 aa, Homo sapiens
VLPLAYSQETVSFYEDLK

SEQ ID NO: 5720 - protein, 7 aa, Homo sapiens
VLPPDLK

SEQ ID NO: 5721 - protein, 9 aa, Homo sapiens
VLPTHDASK

SEQ ID NO: 5722 - protein, 6 aa, Homo sapiens
VLQIEK

SEQ ID NO: 5723 - protein, 6 aa, Homo sapiens
VLQLEK

SEQ ID NO: 5724 - protein, 21 aa, Homo sapiens
VLRENADSLQASLRPHADELK

SEQ ID NO: 5725 - protein, 10 aa, Homo sapiens
VLRSILENLR

SEQ ID NO: 5726 - protein, 17 aa, Homo sapiens
VLSALQAVQGLLVAQGR

SEQ ID NO: 5727 - protein, 15 aa, Homo sapiens
VLSAPPHFHFGQTNR

SEQ ID NO: 5728 - protein, 18 aa, Homo sapiens
VLSIAQAHSPAFSCEQVR

SEQ ID NO: 5729 - protein, 15 aa, Homo sapiens
VLSLAQEQVGGSPEK

SEQ ID NO: 5730 - protein, 42 aa, Homo sapiens
VLSLAQEQVGGSPEKLQETSNWLLSQQQADGSFQDLSPVIHR

SEQ ID NO: 5731 - protein, 7 aa, Homo sapiens
VLSPADK

SEQ ID NO: 5732 - protein, 9 aa, Homo sapiens
VLSYVDWIK

SEQ ID NO: 5733 - protein, 7 aa, Homo sapiens
VLTDELK

SEQ ID NO: 5734 - protein, 7 aa, Homo sapiens
VLTGNPR

SEQ ID NO: 5735 - protein, 10 aa, Homo sapiens
VLTPDAFVCR

SEQ ID NO: 5736 - protein, 10 aa, Homo sapiens
VLVDHFGYTK

SEQ ID NO: 5737 - protein, 13 aa, Homo sapiens
VLVDHFGYTKDDK

SEQ ID NO: 5738 - protein, 7 aa, Homo sapiens
VLVEDTK

SEQ ID NO: 5739 - protein, 8 aa, Homo sapiens
VLVENEHR

SEQ ID NO: 5740 - protein, 7 aa, Homo sapiens
VLVWHTR

SEQ ID NO: 5741 - protein, 8 aa, Homo sapiens
VLYNLFTK

SEQ ID NO: 5742 - protein, 14 aa, Homo sapiens
VLYQSHLLKQILLK

SEQ ID NO: 5743 - protein, 11 aa, Homo sapiens
VMDKYTFELSR

SEQ ID NO: 5744 - protein, 17 aa, Homo sapiens
VMLGETNPADSKPGTIR

SEQ ID NO: 5745 - protein, 8 aa, Homo sapiens
VMNHICSK

SEQ ID NO: 5746 - protein, 5 aa, Homo sapiens
VMNMK

SEQ ID NO: 5747 - protein, 9 aa, Homo sapiens
VMPICLPSK

SEQ ID NO: 5748 - protein, 16 aa, Homo sapiens
VMPICLPSKDYAEVGR

SEQ ID NO: 5749 - protein, 13 aa, Homo sapiens
VMYTQYEDESFTK

SEQ ID NO: 5750 - protein, 15 aa, Homo sapiens
VNAIPFTYEQLDVLK

SEQ ID NO: 5751 - protein, 7 aa, Homo sapiens
VNAPYNK

SEQ ID NO: 5752 - protein, 8 aa, Homo sapiens
VNDAQEYR

SEQ ID NO: 5753 - protein, 9 aa, Homo sapiens
VNDAQEYRR

SEQ ID NO: 5754 - protein, 9 aa, Homo sapiens
VNDESTEGK

SEQ ID NO: 5755 - protein, 13 aa, Homo sapiens
VNDESTEGKTSYR

SEQ ID NO: 5756 - protein, 13 aa, Homo sapiens
VNFLASNIHYPSK

SEQ ID NO: 5757 - protein, 14 aa, Homo sapiens
VNFLASNIHYPSKK

SEQ ID NO: 5758 - protein, 19 aa, Homo sapiens
VNGSPVDNHPFAGDVVFPR

SEQ ID NO: 5759 - protein, 20 aa, Homo sapiens
VNHLYSDLSDALVIFQLYEK

SEQ ID NO: 5760 - protein, 10 aa, Homo sapiens
VNHVTLSQPK

SEQ ID NO: 5761 - protein, 13 aa, Homo sapiens
VNIPLVTNEECQK

SEQ ID NO: 5762 - protein, 14 aa, Homo sapiens
VNIPLVTNEECQKR

SEQ ID NO: 5763 - protein, 5 aa, Homo sapiens
VNIVK

SEQ ID NO: 5764 - protein, 13 aa, Homo sapiens
VNKDDEEFIESNK

SEQ ID NO: 5765 - protein, 8 aa, Homo sapiens
VNKPPYPK

SEQ ID NO: 5766 - protein, 5 aa, Homo sapiens
VNLVK

SEQ ID NO: 5767 - protein, 21 aa, Homo sapiens
VNLVKTIHDLHLFIENIDFNK

SEQ ID NO: 5768 - protein, 5 aa, Homo sapiens
VNMLK

SEQ ID NO: 5769 - protein, 18 aa, Homo sapiens
VNPCIGGVILFHETLYQK

SEQ ID NO: 5770 - protein, 19 aa, Homo sapiens
VNPFRPGDSEPPPAPGAQR

SEQ ID NO: 5771 - protein, 16 aa, Homo sapiens
VNQNLVYESGSLNFSK

SEQ ID NO: 5772 - protein, 36 aa, Homo sapiens
VNQNLVYESGSLNFSKLEIQSQVDSQHVGHSVLTAK

SEQ ID NO: 5773 - protein, 13 aa, Homo sapiens
VNRNNLELSTPLK

SEQ ID NO: 5774 - protein, 9 aa, Homo sapiens
VNSFFSTFK

SEQ ID NO: 5775 - protein, 12 aa, Homo sapiens
VNSQSLSPYLFR

SEQ ID NO: 5776 - protein, 13 aa, Homo sapiens
VNVDEVGGEALGR

SEQ ID NO: 5777 - protein, 11 aa, Homo sapiens
VNVGAGSHPNK

SEQ ID NO: 5778 - protein, 13 aa, Homo sapiens
VNVGAGSHPNKVK

SEQ ID NO: 5779 - protein, 7 aa, Homo sapiens
VNVGDPK

SEQ ID NO: 5780 - protein, 12 aa, Homo sapiens
VNVPVIGGHAGK

SEQ ID NO: 5781 - protein, 16 aa, Homo sapiens
VNWEEEAASGLLTSLK

SEQ ID NO: 5782 - protein, 21 aa, Homo sapiens
VNWEEEAASGLLTSLKDNVPK

SEQ ID NO: 5783 - protein, 9 aa, Homo sapiens
VPAHAVVVR

SEQ ID NO: 5784 - protein, 20 aa, Homo sapiens
VPANLENVGFEVQTAEDDLK

SEQ ID NO: 5785 - protein, 25 aa, Homo sapiens
VPANLENVGFEVQTAEDDLKTDFYK

SEQ ID NO: 5786 - protein, 7 aa, Homo sapiens
VPDEAPK

SEQ ID NO: 5787 - protein, 18 aa, Homo sapiens
VPEARPNSMVVEHPEFLK

SEQ ID NO: 5788 - protein, 12 aa, Homo sapiens
VPENTMHAMQQK

SEQ ID NO: 5789 - protein, 5 aa, Homo sapiens
VPEVR

SEQ ID NO: 5790 - protein, 28 aa, Homo sapiens
VPFDAATLHTSTAMAAQHGMDDDGTGQK

SEQ ID NO: 5791 - protein, 18 aa, Homo sapiens
VPGHEDGVTISGLEPDHK

SEQ ID NO: 5792 - protein, 19 aa, Homo sapiens
VPGLHHTYDVLFLGTGDGR

SEQ ID NO: 5793 - protein, 14 aa, Homo sapiens
VPGLYYFTYHASSR

SEQ ID NO: 5794 - protein, 15 aa, Homo sapiens
VPGTSTSATLTGLTR

SEQ ID NO: 5795 - protein, 10 aa, Homo sapiens
VPHDLDMLLR

SEQ ID NO: 5796 - protein, 10 aa, Homo sapiens
VPLALFALNR

SEQ ID NO: 5797 - protein, 6 aa, Homo sapiens
VPLVDR

SEQ ID NO: 5798 - protein, 10 aa, Homo sapiens
VPMEVVLLKK

SEQ ID NO: 5799 - protein, 5 aa, Homo sapiens
VPMMK

SEQ ID NO: 5800 - protein, 17 aa, Homo sapiens
VPMMLQDQEHHWYLHDR

SEQ ID NO: 5801 - protein, 7 aa, Homo sapiens
VPMMNSK

SEQ ID NO: 5802 - protein, 8 aa, Homo sapiens
VPMMSDPK

SEQ ID NO: 5803 - protein, 9 aa, Homo sapiens
VPMMYGAGK

SEQ ID NO: 5804 - protein, 6 aa, Homo sapiens
VPPEWK

SEQ ID NO: 5805 - protein, 13 aa, Homo sapiens
VPPPRDFHINLFR

SEQ ID NO: 5806 - protein, 32 aa, Homo sapiens
VPQIPFGSSVHIEPYTELYHYSTSVITSSSTR

SEQ ID NO: 5807 - protein, 9 aa, Homo sapiens
VPQTDMTFR

SEQ ID NO: 5808 - protein, 14 aa, Homo sapiens
VPQVSTPTLVEVSR

SEQ ID NO: 5809 - protein, 13 aa, Homo sapiens
VPSHLQAETLVGK

SEQ ID NO: 5810 - protein, 16 aa, Homo sapiens
VPSVYPLDRLEIELLK

SEQ ID NO: 5811 - protein, 20 aa, Homo sapiens
VPSYTLILPSLELPVLHVPR

SEQ ID NO: 5812 - protein, 22 aa, Homo sapiens
VPTADLEDVLPLAEDITNILSK

SEQ ID NO: 5813 - protein, 5 aa, Homo sapiens
VPVAK

SEQ ID NO: 5814 - protein, 22 aa, Homo sapiens
VPVAVQGEDTVQSLTQGDGVAK

SEQ ID NO: 5815 - protein, 24 aa, Homo sapiens
VPVDPATYGQFYGGDSYIILYNYR

SEQ ID NO: 5816 - protein, 5 aa, Homo sapiens
VPVER

SEQ ID NO: 5817 - protein, 11 aa, Homo sapiens
VPVHDVTDASK

SEQ ID NO: 5818 - protein, 5 aa, Homo sapiens
VPVKK

SEQ ID NO: 5819 - protein, 5 aa, Homo sapiens
VPVNK

SEQ ID NO: 5820 - protein, 9 aa, Homo sapiens
VPVSQPIVK

SEQ ID NO: 5821 - protein, 21 aa, Homo sapiens
VQALEEANNDLENKIQDWYDK

SEQ ID NO: 5822 - protein, 5 aa, Homo sapiens
VQAMK

SEQ ID NO: 5823 - protein, 16 aa, Homo sapiens
VQEAHLTEDQIFYFPK

SEQ ID NO: 5824 - protein, 11 aa, Homo sapiens
VQFELHYQEVK

SEQ ID NO: 5825 - protein, 13 aa, Homo sapiens
VQFELHYQEVKWR

SEQ ID NO: 5826 - protein, 10 aa, Homo sapiens
VQGNDHSATR

SEQ ID NO: 5827 - protein, 9 aa, Homo sapiens
VQGVEFSHR

SEQ ID NO: 5828 - protein, 9 aa, Homo sapiens
VQHIQLLQK

SEQ ID NO: 5829 - protein, 12 aa, Homo sapiens
VQHIQLLQKNVR

SEQ ID NO: 5830 - protein, 10 aa, Homo sapiens
VQHLQNELIR

SEQ ID NO: 5831 - protein, 6 aa, Homo sapiens
VQINDK

SEQ ID NO: 5832 - protein, 8 aa, Homo sapiens
VQIQESVR

SEQ ID NO: 5833 - protein, 13 aa, Homo sapiens
VQIYHNPTANSFR

SEQ ID NO: 5834 - protein, 19 aa, Homo sapiens
VQLSNDFDEYIMAIEQTIK

SEQ ID NO: 5835 - protein, 12 aa, Homo sapiens
VQLYDLGLQIHK

SEQ ID NO: 5836 - protein, 10 aa, Homo sapiens
VQPYLDDFQK

SEQ ID NO: 5837 - protein, 11 aa, Homo sapiens
VQPYLDDFQKK

SEQ ID NO: 5838 - protein, 7 aa, Homo sapiens
VQQPDCR

SEQ ID NO: 5839 - protein, 8 aa, Homo sapiens
VQSTITSR

SEQ ID NO: 5840 - protein, 5 aa, Homo sapiens
VQSWK

SEQ ID NO: 5841 - protein, 24 aa, Homo sapiens
VQSWKGSLVQASEANLQAAQDFVR

SEQ ID NO: 5842 - protein, 7 aa, Homo sapiens
VQTAHFK

SEQ ID NO: 5843 - protein, 17 aa, Homo sapiens
VQVLLGAHSLSQPEPSK

SEQ ID NO: 5844 - protein, 18 aa, Homo sapiens
VQVLLGAHSLSQPEPSKR

SEQ ID NO: 5845 - protein, 7 aa, Homo sapiens
VQVVAGK

SEQ ID NO: 5846 - protein, 8 aa, Homo sapiens
VQVVAGKK

SEQ ID NO: 5847 - protein, 41 aa, Homo sapiens
VREEVVTVGNSVNEGLNQPTDDSCFDPYTVSHYAVGDEWER

SEQ ID NO: 5848 - protein, 11 aa, Homo sapiens
VRESDEETQIK

SEQ ID NO: 5849 - protein, 22 aa, Homo sapiens
VREYYFAEAQIADFSDPAFISK

SEQ ID NO: 5850 - protein, 8 aa, Homo sapiens
VRPQQLVK

SEQ ID NO: 5851 - protein, 15 aa, Homo sapiens
VSALLTPAEQTGTWK

SEQ ID NO: 5852 - protein, 12 aa, Homo sapiens
VSAQQVQGVHAR

SEQ ID NO: 5853 - protein, 20 aa, Homo sapiens
VSDIRPGSDPTKPDATLVVK

SEQ ID NO: 5854 - protein, 14 aa, Homo sapiens
VSEADSSNADWVTK

SEQ ID NO: 5855 - protein, 6 aa, Homo sapiens
VSEDLR

SEQ ID NO: 5856 - protein, 12 aa, Homo sapiens
VSEGNHDIALIK

SEQ ID NO: 5857 - protein, 10 aa, Homo sapiens
VSEHFSAMFK

SEQ ID NO: 5858 - protein, 9 aa, Homo sapiens
VSEPVSAGR

SEQ ID NO: 5859 - protein, 9 aa, Homo sapiens
VSFELFADK

SEQ ID NO: 5860 - protein, 6 aa, Homo sapiens
VSFFCK

SEQ ID NO: 5861 - protein, 12 aa, Homo sapiens
VSFLSALEEYTK

SEQ ID NO: 5862 - protein, 22 aa, Homo sapiens
VSFNKPDSHGGVPIHHYQVDVK

SEQ ID NO: 5863 - protein, 7 aa, Homo sapiens
VSGLGEK

SEQ ID NO: 5864 - protein, 22 aa, Homo sapiens
VSGQGLHEGHTFEPAEFIIDTR

SEQ ID NO: 5865 - protein, 14 aa, Homo sapiens
VSHLLGINVTDFTR

SEQ ID NO: 5866 - protein, 12 aa, Homo sapiens
VSHSEDDCLAFK

SEQ ID NO: 5867 - protein, 13 aa, Homo sapiens
VSHVLAALQAGNR

SEQ ID NO: 5868 - protein, 6 aa, Homo sapiens
VSILWR

SEQ ID NO: 5869 - protein, 14 aa, Homo sapiens
VSITSITVENVFVK

SEQ ID NO: 5870 - protein, 8 aa, Homo sapiens
VSLATVDK

SEQ ID NO: 5871 - protein, 5 aa, Homo sapiens
VSLFK

SEQ ID NO: 5872 - protein, 6 aa, Homo sapiens
VSLFKK

SEQ ID NO: 5873 - protein, 16 aa, Homo sapiens
VSLNILPPEEEEETHK

SEQ ID NO: 5874 - protein, 7 aa, Homo sapiens
VSMMQTK

SEQ ID NO: 5875 - protein, 25 aa, Homo sapiens
VSNGAGTMSVSLVADENPFAQGALK

SEQ ID NO: 5876 - protein, 7 aa, Homo sapiens
VSNLEER

SEQ ID NO: 5877 - protein, 19 aa, Homo sapiens
VSNQTLSLFFTVLQDVPVR

SEQ ID NO: 5878 - protein, 8 aa, Homo sapiens
VSPAAPER

SEQ ID NO: 5879 - protein, 18 aa, Homo sapiens
VSPHSGVVALTKPVPEPR

SEQ ID NO: 5880 - protein, 8 aa, Homo sapiens
VSPLTFGR

SEQ ID NO: 5881 - protein, 7 aa, Homo sapiens
VSQEGLK

SEQ ID NO: 5882 - protein, 21 aa, Homo sapiens
VSQMAQYFEPLTLAAVGAASK

SEQ ID NO: 5883 - protein, 6 aa, Homo sapiens
VSRPTK

SEQ ID NO: 5884 - protein, 12 aa, Homo sapiens
VSSDNVADLHEK

SEQ ID NO: 5885 - protein, 7 aa, Homo sapiens
VSSFEEK

SEQ ID NO: 5886 - protein, 5 aa, Homo sapiens
VSSFR

SEQ ID NO: 5887 - protein, 7 aa, Homo sapiens
VSSFYAK

SEQ ID NO: 5888 - protein, 9 aa, Homo sapiens
VSSVEECQK

SEQ ID NO: 5889 - protein, 9 aa, Homo sapiens
VSTAFVYTK

SEQ ID NO: 5890 - protein, 21 aa, Homo sapiens
VSTAFVYTKNPNGYSFSIPVK

SEQ ID NO: 5891 - protein, 10 aa, Homo sapiens
VSVFVDWIHK

SEQ ID NO: 5892 - protein, 13 aa, Homo sapiens
VSVFVDWIHKVMR

SEQ ID NO: 5893 - protein, 7 aa, Homo sapiens
VSVGGEK

SEQ ID NO: 5894 - protein, 8 aa, Homo sapiens
VSVGGEKR

SEQ ID NO: 5895 - protein, 8 aa, Homo sapiens
VSVHPDYR

SEQ ID NO: 5896 - protein, 6 aa, Homo sapiens
VSVNER

SEQ ID NO: 5897 - protein, 18 aa, Homo sapiens
VSVQLEASPAFLAVPVEK

SEQ ID NO: 5898 - protein, 8 aa, Homo sapiens
VSVSQTSK

SEQ ID NO: 5899 - protein, 10 aa, Homo sapiens
VSYVGLVTVR

SEQ ID NO: 5900 - protein, 12 aa, Homo sapiens
VTAAPQSVCALR

SEQ ID NO: 5901 - protein, 6 aa, Homo sapiens
VTAFLK

SEQ ID NO: 5902 - protein, 26 aa, Homo sapiens
VTASDPLDTLGSEGALSPGGVASLLR

SEQ ID NO: 5903 - protein, 5 aa, Homo sapiens
VTAWK

SEQ ID NO: 5904 - protein, 10 aa, Homo sapiens
VTCTNAELVK

SEQ ID NO: 5905 - protein, 13 aa, Homo sapiens
VTEENKELANELR

SEQ ID NO: 5906 - protein, 9 aa, Homo sapiens
VTEGGEPYR

SEQ ID NO: 5907 - protein, 12 aa, Homo sapiens
VTFELTYEELLK

SEQ ID NO: 5908 - protein, 13 aa, Homo sapiens
VTFELTYEELLKR

SEQ ID NO: 5909 - protein, 6 aa, Homo sapiens
VTFHNK

SEQ ID NO: 5910 - protein, 19 aa, Homo sapiens
VTFHNKGAYPLSIEPIGVR

SEQ ID NO: 5911 - protein, 14 aa, Homo sapiens
VTFKANRPFLVFIR

SEQ ID NO: 5912 - protein, 12 aa, Homo sapiens
VTFQLTYEEVLK

SEQ ID NO: 5913 - protein, 13 aa, Homo sapiens
VTFQLTYEEVLKR

SEQ ID NO: 5914 - protein, 14 aa, Homo sapiens
VTGEGCVYLQTSLK

SEQ ID NO: 5915 - protein, 13 aa, Homo sapiens
VTGESHIGGVLLK

SEQ ID NO: 5916 - protein, 17 aa, Homo sapiens
VTGVDTDPHFIIHVPQK

SEQ ID NO: 5917 - protein, 8 aa, Homo sapiens
VTGVVLFR

SEQ ID NO: 5918 - protein, 8 aa, Homo sapiens
VTGWGNLK

SEQ ID NO: 5919 - protein, 17 aa, Homo sapiens
VTGWGNLKETWTANVGK

SEQ ID NO: 5920 - protein, 16 aa, Homo sapiens
VTHTVNKGDTAVLSAR

SEQ ID NO: 5921 - protein, 11 aa, Homo sapiens
VTIGLLFWDGR

SEQ ID NO: 5922 - protein, 16 aa, Homo sapiens
VTIGLLFWDGRGEGLR

SEQ ID NO: 5923 - protein, 11 aa, Homo sapiens
VTIKPAPETEK

SEQ ID NO: 5924 - protein, 9 aa, Homo sapiens
VTILGHVQR

SEQ ID NO: 5925 - protein, 16 aa, Homo sapiens
VTIMWTPPESAVTGYR

SEQ ID NO: 5926 - protein, 31 aa, Homo sapiens
VTIMWTPPESAVTGYRVDVIPVNLPGEHGQR

SEQ ID NO: 5927 - protein, 7 aa, Homo sapiens
VTISVDK

SEQ ID NO: 5928 - protein, 6 aa, Homo sapiens
VTITCR

SEQ ID NO: 5929 - protein, 6 aa, Homo sapiens
VTLEER

SEQ ID NO: 5930 - protein, 12 aa, Homo sapiens
VTLRPYLTPNDR

SEQ ID NO: 5931 - protein, 10 aa, Homo sapiens
VTLTSEEEAR

SEQ ID NO: 5932 - protein, 9 aa, Homo sapiens
VTMQNLNDR

SEQ ID NO: 5933 - protein, 5 aa, Homo sapiens
VTNPK

SEQ ID NO: 5934 - protein, 14 aa, Homo sapiens
VTPNLMGHLCGNQR

SEQ ID NO: 5935 - protein, 15 aa, Homo sapiens
VTPPEGYEVVTVFPK

SEQ ID NO: 5936 - protein, 12 aa, Homo sapiens
VTQAIQSFCLEK

SEQ ID NO: 5937 - protein, 8 aa, Homo sapiens
VTQEFHMK

SEQ ID NO: 5938 - protein, 13 aa, Homo sapiens
VTSDHINFDPVYK

SEQ ID NO: 5939 - protein, 10 aa, Homo sapiens
VTSGSTTTTR

SEQ ID NO: 5940 - protein, 11 aa, Homo sapiens
VTSGSTTTTRR

SEQ ID NO: 5941 - protein, 10 aa, Homo sapiens
VTSIQDWVQK

SEQ ID NO: 5942 - protein, 10 aa, Homo sapiens
VTSIQHWVQK

SEQ ID NO: 5943 - protein, 7 aa, Homo sapiens
VTSVLHK

SEQ ID NO: 5944 - protein, 8 aa, Homo sapiens
VTTHPLAK

SEQ ID NO: 5945 - protein, 13 aa, Homo sapiens
VTTPDTSTTQHNK

SEQ ID NO: 5946 - protein, 13 aa, Homo sapiens
VTTSQDMLSIMEK

SEQ ID NO: 5947 - protein, 6 aa, Homo sapiens
VTTTPK

SEQ ID NO: 5948 - protein, 13 aa, Homo sapiens
VTTTPKNGPGPTK

SEQ ID NO: 5949 - protein, 23 aa, Homo sapiens
VTTVASHTSDSDVPSGVTEVVVK

SEQ ID NO: 5950 - protein, 11 aa, Homo sapiens
VTVFPIGIGDR

SEQ ID NO: 5951 - protein, 18 aa, Homo sapiens
VTVFPIGIGDRYDAAQLR

SEQ ID NO: 5952 - protein, 12 aa, Homo sapiens
VTVLFAGQHIAK

SEQ ID NO: 5953 - protein, 9 aa, Homo sapiens
VTVLGHVQR

SEQ ID NO: 5954 - protein, 8 aa, Homo sapiens
VTVLGQPK

SEQ ID NO: 5955 - protein, 17 aa, Homo sapiens
VTWAPPPSIDLTNFLVR

SEQ ID NO: 5956 - protein, 7 aa, Homo sapiens
VTYDVSR

SEQ ID NO: 5957 - protein, 12 aa, Homo sapiens
VTYTSQEDLVEK

SEQ ID NO: 5958 - protein, 13 aa, Homo sapiens
VTYTSQEDLVEKK

SEQ ID NO: 5959 - protein, 19 aa, Homo sapiens
VVAEGFDFANGINISPDGK

SEQ ID NO: 5960 - protein, 12 aa, Homo sapiens
VVAGVANALAHK

SEQ ID NO: 5961 - protein, 14 aa, Homo sapiens
VVAGVANALAHKYH

SEQ ID NO: 5962 - protein, 36 aa, Homo sapiens
VVAQGVGIPEDSIFTMADRGECVPGEQEPEPILIPR

SEQ ID NO: 5963 - protein, 12 aa, Homo sapiens
VVDLMAHMASKE

SEQ ID NO: 5964 - protein, 7 aa, Homo sapiens
VVDPTKP

SEQ ID NO: 5965 - protein, 9 aa, Homo sapiens
VVDVLDSIK

SEQ ID NO: 5966 - protein, 8 aa, Homo sapiens
VVEEQESR

SEQ ID NO: 5967 - protein, 9 aa, Homo sapiens
VVEESELAR

SEQ ID NO: 5968 - protein, 9 aa, Homo sapiens
VVEHPEFLK

SEQ ID NO: 5969 - protein, 5 aa, Homo sapiens
VVEIK

SEQ ID NO: 5970 - protein, 5 aa, Homo sapiens
VVELK

SEQ ID NO: 5971 - protein, 21 aa, Homo sapiens
VVEPPEKDDQLVVLFPVQKPK

SEQ ID NO: 5972 - protein, 7 aa, Homo sapiens
VVEVGSK

SEQ ID NO: 5973 - protein, 21 aa, Homo sapiens
VVFLNTQLCQFRPDAFGGLPR

SEQ ID NO: 5974 - protein, 19 aa, Homo sapiens
VVGGCVAHPHSWPWQVSLR

SEQ ID NO: 5975 - protein, 21 aa, Homo sapiens
VVGGEDAKPGQFPWQVVLNGK

SEQ ID NO: 5976 - protein, 16 aa, Homo sapiens
VVGGHPGNSPWTVSLR

SEQ ID NO: 5977 - protein, 9 aa, Homo sapiens
VVGGLVALR

SEQ ID NO: 5978 - protein, 23 aa, Homo sapiens
VVGLIQDLKPNTIMVLVNYIHFK

SEQ ID NO: 5979 - protein, 6 aa, Homo sapiens
VVGSPK

SEQ ID NO: 5980 - protein, 6 aa, Homo sapiens
VVHAAK

SEQ ID NO: 5981 - protein, 13 aa, Homo sapiens
VVHFIYIAILSQK

SEQ ID NO: 5982 - protein, 16 aa, Homo sapiens
VVHFIYIAILSQKFPK

SEQ ID NO: 5983 - protein, 13 aa, Homo sapiens
VVLAGGVAPALFR

SEQ ID NO: 5984 - protein, 15 aa, Homo sapiens
VVLAYEPVWAIGTGK

SEQ ID NO: 5985 - protein, 9 aa, Homo sapiens
VVLGDQDLK

SEQ ID NO: 5986 - protein, 10 aa, Homo sapiens
VVLGDQDLKK

SEQ ID NO: 5987 - protein, 16 aa, Homo sapiens
VVLHPNYHQVDIGLIK

SEQ ID NO: 5988 - protein, 16 aa, Homo sapiens
VVLHPNYSQVDIGLIK

SEQ ID NO: 5989 - protein, 10 aa, Homo sapiens
VVLKGDVSLK

SEQ ID NO: 5990 - protein, 8 aa, Homo sapiens
VVLSQGSK

SEQ ID NO: 5991 - protein, 8 aa, Homo sapiens
VVLVAVDK

SEQ ID NO: 5992 - protein, 15 aa, Homo sapiens
VVLVAVDKGVFVLNK

SEQ ID NO: 5993 - protein, 17 aa, Homo sapiens
VVLVSLQSGYLFIQTDK

SEQ ID NO: 5994 - protein, 7 aa, Homo sapiens
VVMYEGK

SEQ ID NO: 5995 - protein, 19 aa, Homo sapiens
VVNNSPQPQNVVFDVQIPK

SEQ ID NO: 5996 - protein, 7 aa, Homo sapiens
VVNPTQK

SEQ ID NO: 5997 - protein, 7 aa, Homo sapiens
VVPEGVK

SEQ ID NO: 5998 - protein, 8 aa, Homo sapiens
VVPEGVKR

SEQ ID NO: 5999 - protein, 11 aa, Homo sapiens
VVPGYGHAVLR

SEQ ID NO: 6000 - protein, 23 aa, Homo sapiens
VVQGKEPAHLMSLFGGKPMIIYK

SEQ ID NO: 6001 - protein, 14 aa, Homo sapiens
VVQGLHHGVSQAGR

SEQ ID NO: 6002 - protein, 8 aa, Homo sapiens
VVSGFSLK

SEQ ID NO: 6003 - protein, 24 aa, Homo sapiens
VVSMDENFHPLNELIPLVYIQDPK

SEQ ID NO: 6004 - protein, 8 aa, Homo sapiens
VVSSIEQK

SEQ ID NO: 6005 - protein, 15 aa, Homo sapiens
VVSTNYNQHAMVFFK

SEQ ID NO: 6006 - protein, 11 aa, Homo sapiens
VVSVDENFRPR

SEQ ID NO: 6007 - protein, 22 aa, Homo sapiens
VVTFCDYAYNTFQVTTGGMVLK

SEQ ID NO: 6008 - protein, 10 aa, Homo sapiens
VVTFCGHTSK

SEQ ID NO: 6009 - protein, 28 aa, Homo sapiens
VVTPLSPPTNLHLEANPDTGVLTVSWER

SEQ ID NO: 6010 - protein, 23 aa, Homo sapiens
VVTVFSVADGYSENNVFYGHHAK

SEQ ID NO: 6011 - protein, 16 aa, Homo sapiens
VVVAENFDEIVNNENK

SEQ ID NO: 6012 - protein, 8 aa, Homo sapiens
VVVHPDYR

SEQ ID NO: 6013 - protein, 5 aa, Homo sapiens
VVVQK

SEQ ID NO: 6014 - protein, 6 aa, Homo sapiens
VVVQKK

SEQ ID NO: 6015 - protein, 10 aa, Homo sapiens
VVVQTESGGR

SEQ ID NO: 6016 - protein, 6 aa, Homo sapiens
VWELSK

SEQ ID NO: 6017 - protein, 13 aa, Homo sapiens
VWFELTQGSITKR

SEQ ID NO: 6018 - protein, 32 aa, Homo sapiens
VWPQQPSGELFEIEIDTLETTCHVLDPTPVAR

SEQ ID NO: 6019 - protein, 12 aa, Homo sapiens
VWSPLVTEEGKR

SEQ ID NO: 6020 - protein, 8 aa, Homo sapiens
VWVYPPEK

SEQ ID NO: 6021 - protein, 9 aa, Homo sapiens
VWVYPPEKK

SEQ ID NO: 6022 - protein, 21 aa, Homo sapiens
VYDYYETDEFAIAEYNAPCSK

SEQ ID NO: 6023 - protein, 10 aa, Homo sapiens
VYEGERPLTK

SEQ ID NO: 6024 - protein, 8 aa, Homo sapiens
VYFAGFPR

SEQ ID NO: 6025 - protein, 6 aa, Homo sapiens
VYFDLR

SEQ ID NO: 6026 - protein, 5 aa, Homo sapiens
VYFFK

SEQ ID NO: 6027 - protein, 7 aa, Homo sapiens
VYFFKGK

SEQ ID NO: 6028 - protein, 13 aa, Homo sapiens
VYKPSAGNNSLYR

SEQ ID NO: 6029 - protein, 15 aa, Homo sapiens
VYLLYRPGHYDILYK

SEQ ID NO: 6030 - protein, 7 aa, Homo sapiens
VYLPWSR

SEQ ID NO: 6031 - protein, 7 aa, Homo sapiens
VYLSECK

SEQ ID NO: 6032 - protein, 10 aa, Homo sapiens
VYLYEGLLGR

SEQ ID NO: 6033 - protein, 10 aa, Homo sapiens
VYPHTPTSFK

SEQ ID NO: 6034 - protein, 6 aa, Homo sapiens
VYSIGR

SEQ ID NO: 6035 - protein, 12 aa, Homo sapiens
VYSLNDDLKPAK

SEQ ID NO: 6036 - protein, 13 aa, Homo sapiens
VYSLNDDLKPAKR

SEQ ID NO: 6037 - protein, 10 aa, Homo sapiens
VYSTSVTGSR

SEQ ID NO: 6038 - protein, 6 aa, Homo sapiens
VYVHLK

SEQ ID NO: 6039 - protein, 7 aa, Homo sapiens
VYVYNGK

SEQ ID NO: 6040 - protein, 14 aa, Homo sapiens
VYWTNWHTGTISYR

SEQ ID NO: 6041 - protein, 9 aa, Homo sapiens
WADLSGITK

SEQ ID NO: 6042 - protein, 6 aa, Homo sapiens
WANFAK

SEQ ID NO: 6043 - protein, 11 aa, Homo sapiens
WCAVSEHEATK

SEQ ID NO: 6044 - protein, 13 aa, Homo sapiens
WCGTTQNYDADQK

SEQ ID NO: 6045 - protein, 10 aa, Homo sapiens
WCHDNGVNYK

SEQ ID NO: 6046 - protein, 10 aa, Homo sapiens
WDAQIPHQHR

SEQ ID NO: 6047 - protein, 10 aa, Homo sapiens
WDEELAAFAK

SEQ ID NO: 6048 - protein, 15 aa, Homo sapiens
WDLQHPHQHPFEPGK

SEQ ID NO: 6049 - protein, 5 aa, Homo sapiens
WDPYK

SEQ ID NO: 6050 - protein, 18 aa, Homo sapiens
WDPYKQGFGNVATNTDGK

SEQ ID NO: 6051 - protein, 9 aa, Homo sapiens
WDRELISER

SEQ ID NO: 6052 - protein, 10 aa, Homo sapiens
WEAEPVYVQR

SEQ ID NO: 6053 - protein, 6 aa, Homo sapiens
WEDPGK

SEQ ID NO: 6054 - protein, 12 aa, Homo sapiens
WEHGDGYPFDGK

SEQ ID NO: 6055 - protein, 7 aa, Homo sapiens
WELALGR

SEQ ID NO: 6056 - protein, 8 aa, Homo sapiens
WELCDIPR

SEQ ID NO: 6057 - protein, 14 aa, Homo sapiens
WEMPFDPQDTHQSR

SEQ ID NO: 6058 - protein, 8 aa, Homo sapiens
WERPFEVK

SEQ ID NO: 6059 - protein, 24 aa, Homo sapiens
WERPFEVKDTEEEDFHVDQVTTVK

SEQ ID NO: 6060 - protein, 5 aa, Homo sapiens
WEYCK

SEQ ID NO: 6061 - protein, 7 aa, Homo sapiens
WEYCNLK

SEQ ID NO: 6062 - protein, 8 aa, Homo sapiens
WEYCNLKK

SEQ ID NO: 6063 - protein, 21 aa, Homo sapiens
WFGSGALLSASWILTAAHVLR

SEQ ID NO: 6064 - protein, 17 aa, Homo sapiens
WFLLEQPEIQVAHFPFK

SEQ ID NO: 6065 - protein, 13 aa, Homo sapiens
WFLQHRPQVGYIR

SEQ ID NO: 6066 - protein, 9 aa, Homo sapiens
WFYIASAFR

SEQ ID NO: 6067 - protein, 8 aa, Homo sapiens
WGYCLEPK

SEQ ID NO: 6068 - protein, 12 aa, Homo sapiens
WHWSSGSLVSYK

SEQ ID NO: 6069 - protein, 5 aa, Homo sapiens
WIDIK

SEQ ID NO: 6070 - protein, 7 aa, Homo sapiens
WIIEKYR

SEQ ID NO: 6071 - protein, 9 aa, Homo sapiens
WIISSLTPK

SEQ ID NO: 6072 - protein, 12 aa, Homo sapiens
WILTAAHTIYPK

SEQ ID NO: 6073 - protein, 12 aa, Homo sapiens
WILTAAHTLYPK

SEQ ID NO: 6074 - protein, 5 aa, Homo sapiens
WIQYK

SEQ ID NO: 6075 - protein, 10 aa, Homo sapiens
WISDHEYLYK

SEQ ID NO: 6076 - protein, 14 aa, Homo sapiens
WIVTAAHCVETGVK

SEQ ID NO: 6077 - protein, 16 aa, Homo sapiens
WKEATIPGHLNSYTIK

SEQ ID NO: 6078 - protein, 13 aa, Homo sapiens
WKETLFSVMPGLK

SEQ ID NO: 6079 - protein, 13 aa, Homo sapiens
WKNFPSPVDAAFR

SEQ ID NO: 6080 - protein, 8 aa, Homo sapiens
WKTTFDPK

SEQ ID NO: 6081 - protein, 5 aa, Homo sapiens
WLDIK

SEQ ID NO: 6082 - protein, 5 aa, Homo sapiens
WLDLK

SEQ ID NO: 6083 - protein, 8 aa, Homo sapiens
WLDLSHNR

SEQ ID NO: 6084 - protein, 9 aa, Homo sapiens
WLNVQLSPR

SEQ ID NO: 6085 - protein, 12 aa, Homo sapiens
WLPSSSPVTGYR

SEQ ID NO: 6086 - protein, 6 aa, Homo sapiens
WLQAKR

SEQ ID NO: 6087 - protein, 6 aa, Homo sapiens
WLQAQK

SEQ ID NO: 6088 - protein, 5 aa, Homo sapiens
WLQYK

SEQ ID NO: 6089 - protein, 7 aa, Homo sapiens
WLSEEQR

SEQ ID NO: 6090 - protein, 8 aa, Homo sapiens
WLTFSLGK

SEQ ID NO: 6091 - protein, 19 aa, Homo sapiens
WLTPFDPVFTEVDTFHLDK

SEQ ID NO: 6092 - protein, 10 aa, Homo sapiens
WLVGEMHCQK

SEQ ID NO: 6093 - protein, 26 aa, Homo sapiens
WMHSFNFVLSANLHGGAVVANYPYDK

SEQ ID NO: 6094 - protein, 5 aa, Homo sapiens
WNFEK

SEQ ID NO: 6095 - protein, 13 aa, Homo sapiens
WNFYYSPQSSPDK

SEQ ID NO: 6096 - protein, 14 aa, Homo sapiens
WNFYYSPQSSPDKK

SEQ ID NO: 6097 - protein, 6 aa, Homo sapiens
WNNLLR

SEQ ID NO: 6098 - protein, 9 aa, Homo sapiens
WNNYMMDWK

SEQ ID NO: 6099 - protein, 6 aa, Homo sapiens
WNTEDK

SEQ ID NO: 6100 - protein, 8 aa, Homo sapiens
WNYIEGTK

SEQ ID NO: 6101 - protein, 7 aa, Homo sapiens
WPAVFTR

SEQ ID NO: 6102 - protein, 8 aa, Homo sapiens
WPEPVFGR

SEQ ID NO: 6103 - protein, 13 aa, Homo sapiens
WPTSGQLFLGHPK

SEQ ID NO: 6104 - protein, 9 aa, Homo sapiens
WQEEMELYR

SEQ ID NO: 6105 - protein, 10 aa, Homo sapiens
WQSIPLCVEK

SEQ ID NO: 6106 - protein, 8 aa, Homo sapiens
WRDSLEFR

SEQ ID NO: 6107 - protein, 9 aa, Homo sapiens
WRPKNSVGR

SEQ ID NO: 6108 - protein, 16 aa, Homo sapiens
WSAGLTSSQVDLYIPK

SEQ ID NO: 6109 - protein, 32 aa, Homo sapiens
WSGPLSLQEVDEQPQHPLHVTYAGAAVDELGK

SEQ ID NO: 6110 - protein, 9 aa, Homo sapiens
WSHPPSCIK

SEQ ID NO: 6111 - protein, 5 aa, Homo sapiens
WSNSK

SEQ ID NO: 6112 - protein, 6 aa, Homo sapiens
WSPEMK

SEQ ID NO: 6113 - protein, 12 aa, Homo sapiens
WSRPQAPITGYR

SEQ ID NO: 6114 - protein, 10 aa, Homo sapiens
WSSTSPHRPR

SEQ ID NO: 6115 - protein, 8 aa, Homo sapiens
WSTFLDLK

SEQ ID NO: 6116 - protein, 15 aa, Homo sapiens
WSVLPRPDLHHDVNR

SEQ ID NO: 6117 - protein, 8 aa, Homo sapiens
WTGRPTCR

SEQ ID NO: 6118 - protein, 10 aa, Homo sapiens
WTLTAPPGYR

SEQ ID NO: 6119 - protein, 6 aa, Homo sapiens
WTNQQK

SEQ ID NO: 6120 - protein, 6 aa, Homo sapiens
WTSFLK

SEQ ID NO: 6121 - protein, 12 aa, Homo sapiens
WVFKEEDPIHLR

SEQ ID NO: 6122 - protein, 16 aa, Homo sapiens
WVLTAAHCLLYPPWDK

SEQ ID NO: 6123 - protein, 18 aa, Homo sapiens
WVMVPMMSLHHLTIPYFR

SEQ ID NO: 6124 - protein, 9 aa, Homo sapiens
WWHTGALYR

SEQ ID NO: 6125 - protein, 6 aa, Homo sapiens
WYEIEK

SEQ ID NO: 6126 - protein, 25 aa, Homo sapiens
WYLFGMGNEVDVHAAFFHGQALTNK

SEQ ID NO: 6127 - protein, 18 aa, Homo sapiens
WYQMGIVSWGEGCDRDGK

SEQ ID NO: 6128 - protein, 5 aa, Homo sapiens
WYSMK

SEQ ID NO: 6129 - protein, 6 aa, Homo sapiens
WYSMKK

SEQ ID NO: 6130 - protein, 6 aa, Homo sapiens
WYVPVK

SEQ ID NO: 6131 - protein, 13 aa, Homo sapiens
YAAELHLVHWNPK

SEQ ID NO: 6132 - protein, 13 aa, Homo sapiens
YAAELHLVHWNTK

SEQ ID NO: 6133 - protein, 15 aa, Homo sapiens
YAASSYLSLTPEQWK

SEQ ID NO: 6134 - protein, 18 aa, Homo sapiens
YAASSYLSLTPEQWKSHR

SEQ ID NO: 6135 - protein, 6 aa, Homo sapiens
YAFELK

SEQ ID NO: 6136 - protein, 8 aa, Homo sapiens
YAFELKEK

SEQ ID NO: 6137 - protein, 9 aa, Homo sapiens
YAFVNWINK

SEQ ID NO: 6138 - protein, 7 aa, Homo sapiens
YAGDIIK

SEQ ID NO: 6139 - protein, 14 aa, Homo sapiens
YAGSQVASTSEVLK

SEQ ID NO: 6140 - protein, 9 aa, Homo sapiens
YALPLVGHR

SEQ ID NO: 6141 - protein, 11 aa, Homo sapiens
YALYDATYETK

SEQ ID NO: 6142 - protein, 14 aa, Homo sapiens
YAPSEAGLHEMDIR

SEQ ID NO: 6143 - protein, 28 aa, Homo sapiens
YAVDDVQYVDEIASVLTSQKPSVLLTLR

SEQ ID NO: 6144 - protein, 10 aa, Homo sapiens
YAVSEAAAHK

SEQ ID NO: 6145 - protein, 19 aa, Homo sapiens
YAVSEAAAHKYGIDWASGR

SEQ ID NO: 6146 - protein, 20 aa, Homo sapiens
YAYLLQPSQFHGEPCNFSDK

SEQ ID NO: 6147 - protein, 9 aa, Homo sapiens
YCDREYAVK

SEQ ID NO: 6148 - protein, 7 aa, Homo sapiens
YDAAQLR

SEQ ID NO: 6149 - protein, 6 aa, Homo sapiens
YDDLVR

SEQ ID NO: 6150 - protein, 24 aa, Homo sapiens
YDKNQDVHSINLPFFETLQEYFER

SEQ ID NO: 6151 - protein, 13 aa, Homo sapiens
YDLAFVVASQATK

SEQ ID NO: 6152 - protein, 6 aa, Homo sapiens
YDLDFK

SEQ ID NO: 6153 - protein, 6 aa, Homo sapiens
YDNSLK

SEQ ID NO: 6154 - protein, 19 aa, Homo sapiens
YDPSLKPLSVSYDQATSLR

SEQ ID NO: 6155 - protein, 19 aa, Homo sapiens
YDRLEIWDGFPDVGPHIGR

SEQ ID NO: 6156 - protein, 7 aa, Homo sapiens
YDSTCER

SEQ ID NO: 6157 - protein, 12 aa, Homo sapiens
YDVDTQMWTILK

SEQ ID NO: 6158 - protein, 15 aa, Homo sapiens
YDVDTQMWTILKDSR

SEQ ID NO: 6159 - protein, 10 aa, Homo sapiens
YDVENCLANK

SEQ ID NO: 6160 - protein, 29 aa, Homo sapiens
YDVENCLANKVDLSFSPSQSLPASHAHLR

SEQ ID NO: 6161 - protein, 17 aa, Homo sapiens
YDYVEVFDGENENGHFR

SEQ ID NO: 6162 - protein, 13 aa, Homo sapiens
YEASILTHDSSIR

SEQ ID NO: 6163 - protein, 20 aa, Homo sapiens
YEDGTLSLTSTSDLQSGIIK

SEQ ID NO: 6164 - protein, 6 aa, Homo sapiens
YEEEIK

SEQ ID NO: 6165 - protein, 10 aa, Homo sapiens
YEELQITAGR

SEQ ID NO: 6166 - protein, 6 aa, Homo sapiens
YEFILK

SEQ ID NO: 6167 - protein, 16 aa, Homo sapiens
YEFILKEYESYSDFER

SEQ ID NO: 6168 - protein, 7 aa, Homo sapiens
YEFLNGR

SEQ ID NO: 6169 - protein, 15 aa, Homo sapiens
YEGGREHVAHLLFLR

SEQ ID NO: 6170 - protein, 5 aa, Homo sapiens
YEIFK

SEQ ID NO: 6171 - protein, 5 aa, Homo sapiens
YEINK

SEQ ID NO: 6172 - protein, 11 aa, Homo sapiens
YEITTIHNLFR

SEQ ID NO: 6173 - protein, 8 aa, Homo sapiens
YEIVVEAR

SEQ ID NO: 6174 - protein, 14 aa, Homo sapiens
YEKPDGSPVFIAFR

SEQ ID NO: 6175 - protein, 9 aa, Homo sapiens
YEKPGSPPR

SEQ ID NO: 6176 - protein, 5 aa, Homo sapiens
YELFK

SEQ ID NO: 6177 - protein, 18 aa, Homo sapiens
YELLYLAEQFAGVVLYLK

SEQ ID NO: 6178 - protein, 8 aa, Homo sapiens
YEMHELLR

SEQ ID NO: 6179 - protein, 6 aa, Homo sapiens
YEMYLK

SEQ ID NO: 6180 - protein, 8 aa, Homo sapiens
YENEVALR

SEQ ID NO: 6181 - protein, 9 aa, Homo sapiens
YENYELTLK

SEQ ID NO: 6182 - protein, 11 aa, Homo sapiens
YEPQLPDHWEK

SEQ ID NO: 6183 - protein, 15 aa, Homo sapiens
YEVQGEVFTKPQLWP

SEQ ID NO: 6184 - protein, 9 aa, Homo sapiens
YEVSVYALK

SEQ ID NO: 6185 - protein, 31 aa, Homo sapiens
YEVSVYALKDTLTSRPAQGVVTTLENVSPPR

SEQ ID NO: 6186 - protein, 9 aa, Homo sapiens
YEYLEGGDR

SEQ ID NO: 6187 - protein, 20 aa, Homo sapiens
YFEITDESPYVHYLNTFSSK

SEQ ID NO: 6188 - protein, 11 aa, Homo sapiens
YFFTSVSRPGR

SEQ ID NO: 6189 - protein, 12 aa, Homo sapiens
YFHHNSDFHIPK

SEQ ID NO: 6190 - protein, 12 aa, Homo sapiens
YFHHNSDFYIPK

SEQ ID NO: 6191 - protein, 7 aa, Homo sapiens
YFHLINR

SEQ ID NO: 6192 - protein, 8 aa, Homo sapiens
YFIDFVAR

SEQ ID NO: 6193 - protein, 24 aa, Homo sapiens
YFKPGMPFDLMVFVTNPDGSPAYR

SEQ ID NO: 6194 - protein, 5 aa, Homo sapiens
YFNYK

SEQ ID NO: 6195 - protein, 14 aa, Homo sapiens
YFQFQEEGKEGENR

SEQ ID NO: 6196 - protein, 8 aa, Homo sapiens
YFQHLLGK

SEQ ID NO: 6197 - protein, 5 aa, Homo sapiens
YFYNK

SEQ ID NO: 6198 - protein, 5 aa, Homo sapiens
YFYSR

SEQ ID NO: 6199 - protein, 8 aa, Homo sapiens
YGAATFTR

SEQ ID NO: 6200 - protein, 6 aa, Homo sapiens
YGAEVK

SEQ ID NO: 6201 - protein, 6 aa, Homo sapiens
YGDFNK

SEQ ID NO: 6202 - protein, 16 aa, Homo sapiens
YGDNNHSQGVNWFHWK

SEQ ID NO: 6203 - protein, 17 aa, Homo sapiens
YGFCEAADQFHVLDEVR

SEQ ID NO: 6204 - protein, 18 aa, Homo sapiens
YGFCEAADQFHVLDEVRR

SEQ ID NO: 6205 - protein, 12 aa, Homo sapiens
YGFIEGHVVIPR

SEQ ID NO: 6206 - protein, 9 aa, Homo sapiens
YGFYTHVFR

SEQ ID NO: 6207 - protein, 26 aa, Homo sapiens
YGGGFYSTQDTINAIEGLTEYSLLVK

SEQ ID NO: 6208 - protein, 29 aa, Homo sapiens
YGGGFYSTQDTINAIEGLTEYSLLVKQLR

SEQ ID NO: 6209 - protein, 5 aa, Homo sapiens
YGGLK

SEQ ID NO: 6210 - protein, 15 aa, Homo sapiens
YGGPNHHLPLPDNWK

SEQ ID NO: 6211 - protein, 13 aa, Homo sapiens
YGGPYHIGGSPFK

SEQ ID NO: 6212 - protein, 9 aa, Homo sapiens
YGHSLALYK

SEQ ID NO: 6213 - protein, 11 aa, Homo sapiens
YGHSLALYKDK

SEQ ID NO: 6214 - protein, 9 aa, Homo sapiens
YGIDWASGR

SEQ ID NO: 6215 - protein, 6 aa, Homo sapiens
YGIYTK

SEQ ID NO: 6216 - protein, 10 aa, Homo sapiens
YGLDSDLSCK

SEQ ID NO: 6217 - protein, 24 aa, Homo sapiens
YGLHNIQISHLSIASSQVELVEAK

SEQ ID NO: 6218 - protein, 11 aa, Homo sapiens
YGLVTYATYPK

SEQ ID NO: 6219 - protein, 12 aa, Homo sapiens
YGMVAQVTQTLK

SEQ ID NO: 6220 - protein, 7 aa, Homo sapiens
YGMWTIK

SEQ ID NO: 6221 - protein, 21 aa, Homo sapiens
YGNQVSEHTLGTVHTHSAHFK

SEQ ID NO: 6222 - protein, 6 aa, Homo sapiens
YGPIIK

SEQ ID NO: 6223 - protein, 11 aa, Homo sapiens
YGQPLPGYTTK

SEQ ID NO: 6224 - protein, 18 aa, Homo sapiens
YGQTIRPICLPCTEGTTR

SEQ ID NO: 6225 - protein, 16 aa, Homo sapiens
YGRNQGNTWLTAFVLK

SEQ ID NO: 6226 - protein, 9 aa, Homo sapiens
YGTLFTMDR

SEQ ID NO: 6227 - protein, 11 aa, Homo sapiens
YGVYSYIHHNK

SEQ ID NO: 6228 - protein, 13 aa, Homo sapiens
YGYTHLSTGDLLR

SEQ ID NO: 6229 - protein, 25 aa, Homo sapiens
YHFEALADTGISSEFYDNANDLLSK

SEQ ID NO: 6230 - protein, 7 aa, Homo sapiens
YHFFLYK

SEQ ID NO: 6231 - protein, 9 aa, Homo sapiens
YHFPSLFFR

SEQ ID NO: 6232 - protein, 22 aa, Homo sapiens
YHFVTPLTSMVVTKPEDNEDER

SEQ ID NO: 6233 - protein, 10 aa, Homo sapiens
YHGDPMPCPK

SEQ ID NO: 6234 - protein, 10 aa, Homo sapiens
YHGYIFGFYK

SEQ ID NO: 6235 - protein, 18 aa, Homo sapiens
YHIGDEILVSGGIGALVR

SEQ ID NO: 6236 - protein, 27 aa, Homo sapiens
YHQDTQGWGDIGYSFVVGSDGYVYEGR

SEQ ID NO: 6237 - protein, 11 aa, Homo sapiens
YHWEHTGLTLR

SEQ ID NO: 6238 - protein, 6 aa, Homo sapiens
YIAQLK

SEQ ID NO: 6239 - protein, 7 aa, Homo sapiens
YIAYLVR

SEQ ID NO: 6240 - protein, 12 aa, Homo sapiens
YICENQDSISSK

SEQ ID NO: 6241 - protein, 9 aa, Homo sapiens
YIDQEELNK

SEQ ID NO: 6242 - protein, 5 aa, Homo sapiens
YIEDK

SEQ ID NO: 6243 - protein, 11 aa, Homo sapiens
YIETDPANRDR

SEQ ID NO: 6244 - protein, 5 aa, Homo sapiens
YIFFK

SEQ ID NO: 6245 - protein, 9 aa, Homo sapiens
YIFHNFMER

SEQ ID NO: 6246 - protein, 13 aa, Homo sapiens
YIFSDDSSQLTIK

SEQ ID NO: 6247 - protein, 8 aa, Homo sapiens
YIILLLGK

SEQ ID NO: 6248 - protein, 11 aa, Homo sapiens
YILVSLILLGK

SEQ ID NO: 6249 - protein, 21 aa, Homo sapiens
YIPYTLYSVFNPSDHDLVLIR

SEQ ID NO: 6250 - protein, 9 aa, Homo sapiens
YISKYELDK

SEQ ID NO: 6251 - protein, 6 aa, Homo sapiens
YISQMK

SEQ ID NO: 6252 - protein, 14 aa, Homo sapiens
YIYGKPVQGVAYVR

SEQ ID NO: 6253 - protein, 16 aa, Homo sapiens
YIYPLDSLTWIEYWPR

SEQ ID NO: 6254 - protein, 25 aa, Homo sapiens
YKAEEHTVVLTVTGEPCHFPFQYHR

SEQ ID NO: 6255 - protein, 10 aa, Homo sapiens
YKATLLDIYK

SEQ ID NO: 6256 - protein, 16 aa, Homo sapiens
YKEDFSTTGTAYFEVK

SEQ ID NO: 6257 - protein, 12 aa, Homo sapiens
YKEENDDFASFR

SEQ ID NO: 6258 - protein, 16 aa, Homo sapiens
YKLQDFSDQLSDYYEK

SEQ ID NO: 6259 - protein, 12 aa, Homo sapiens
YKPESEELTAER

SEQ ID NO: 6260 - protein, 9 aa, Homo sapiens
YKPTPIPIK

SEQ ID NO: 6261 - protein, 10 aa, Homo sapiens
YLAALQLLQK

SEQ ID NO: 6262 - protein, 12 aa, Homo sapiens
YLAEFATGNDRK

SEQ ID NO: 6263 - protein, 11 aa, Homo sapiens
YLAEVAAGDDK

SEQ ID NO: 6264 - protein, 12 aa, Homo sapiens
YLAEVAAGDDKK

SEQ ID NO: 6265 - protein, 10 aa, Homo sapiens
YLAEVATGEK

SEQ ID NO: 6266 - protein, 5 aa, Homo sapiens
YLDEK

SEQ ID NO: 6267 - protein, 9 aa, Homo sapiens
YLDFVFAVK

SEQ ID NO: 6268 - protein, 16 aa, Homo sapiens
YLDKTEQWSTLPPETK

SEQ ID NO: 6269 - protein, 8 aa, Homo sapiens
YLDSTFTK

SEQ ID NO: 6270 - protein, 10 aa, Homo sapiens
YLDWIHGHIR

SEQ ID NO: 6271 - protein, 5 aa, Homo sapiens
YLEDK

SEQ ID NO: 6272 - protein, 8 aa, Homo sapiens
YLESAGAR

SEQ ID NO: 6273 - protein, 23 aa, Homo sapiens
YLEVQYKPQVHIQMTYPLQGLTR

SEQ ID NO: 6274 - protein, 8 aa, Homo sapiens
YLFLNGNK

SEQ ID NO: 6275 - protein, 7 aa, Homo sapiens
YLFQILR

SEQ ID NO: 6276 - protein, 8 aa, Homo sapiens
YLGEEYVK

SEQ ID NO: 6277 - protein, 45 aa, Homo sapiens
YLHTAVIVSGTMLVFGGNTHNDTSMSHGAKCFSSDFMAYDIACDR

SEQ ID NO: 6278 - protein, 14 aa, Homo sapiens
YLIVVRPAPPPSQK

SEQ ID NO: 6279 - protein, 10 aa, Homo sapiens
YLLKGEYVGK

SEQ ID NO: 6280 - protein, 14 aa, Homo sapiens
YLLRPLGPHGLLSK

SEQ ID NO: 6281 - protein, 8 aa, Homo sapiens
YLPCSVLR

SEQ ID NO: 6282 - protein, 12 aa, Homo sapiens
YLQEIYNSNNQK

SEQ ID NO: 6283 - protein, 10 aa, Homo sapiens
YLQGSSVQLR

SEQ ID NO: 6284 - protein, 12 aa, Homo sapiens
YLQTLTTIAAEK

SEQ ID NO: 6285 - protein, 14 aa, Homo sapiens
YLSDHSFLVSQGDR

SEQ ID NO: 6286 - protein, 34 aa, Homo sapiens
YLSDHSFLVSQGDREQAPNLVYMVTGNPASDEIK

SEQ ID NO: 6287 - protein, 7 aa, Homo sapiens
YLSFHFK

SEQ ID NO: 6288 - protein, 6 aa, Homo sapiens
YLSQLK

SEQ ID NO: 6289 - protein, 6 aa, Homo sapiens
YLSQMK

SEQ ID NO: 6290 - protein, 10 aa, Homo sapiens
YLTLNTESTR

SEQ ID NO: 6291 - protein, 15 aa, Homo sapiens
YLTSEMHGARPGASK

SEQ ID NO: 6292 - protein, 9 aa, Homo sapiens
YLTVAAVFR

SEQ ID NO: 6293 - protein, 7 aa, Homo sapiens
YLWLHLR

SEQ ID NO: 6294 - protein, 7 aa, Homo sapiens
YLYEIAR

SEQ ID NO: 6295 - protein, 14 aa, Homo sapiens
YLYHGQTLETLGGK

SEQ ID NO: 6296 - protein, 15 aa, Homo sapiens
YLYHGQTLETLGGKK

SEQ ID NO: 6297 - protein, 25 aa, Homo sapiens
YLYIAVTVIESTGGFSEEAEIPGIK

SEQ ID NO: 6298 - protein, 15 aa, Homo sapiens
YLYLRNNQIDHIDEK

SEQ ID NO: 6299 - protein, 7 aa, Homo sapiens
YNAEKPK

SEQ ID NO: 6300 - protein, 11 aa, Homo sapiens
YNALDLTNNGK

SEQ ID NO: 6301 - protein, 6 aa, Homo sapiens
YNELLK

SEQ ID NO: 6302 - protein, 14 aa, Homo sapiens
YNEQHVPGSPFTAR

SEQ ID NO: 6303 - protein, 6 aa, Homo sapiens
YNFSFR

SEQ ID NO: 6304 - protein, 7 aa, Homo sapiens
YNILPEK

SEQ ID NO: 6305 - protein, 15 aa, Homo sapiens
YNILPEKEDSPFALK

SEQ ID NO: 6306 - protein, 27 aa, Homo sapiens
YNILPEKEEFPFALGVQTLPQTCDEPK

SEQ ID NO: 6307 - protein, 7 aa, Homo sapiens
YNLLPEK

SEQ ID NO: 6308 - protein, 10 aa, Homo sapiens
YNPGHLLPHK

SEQ ID NO: 6309 - protein, 22 aa, Homo sapiens
YNPIPSVQLMGNGFHFLAGEPR

SEQ ID NO: 6310 - protein, 6 aa, Homo sapiens
YNPSLK

SEQ ID NO: 6311 - protein, 18 aa, Homo sapiens
YNPVVIDFEMQPIHEVLR

SEQ ID NO: 6312 - protein, 12 aa, Homo sapiens
YNQATPNFHQWR

SEQ ID NO: 6313 - protein, 15 aa, Homo sapiens
YNSQNQSNNQFVLYR

SEQ ID NO: 6314 - protein, 9 aa, Homo sapiens
YNWRENLDR

SEQ ID NO: 6315 - protein, 22 aa, Homo sapiens
YPALHKPENQDIDWGALEGETR

SEQ ID NO: 6316 - protein, 25 aa, Homo sapiens
YPALHKPENQDIDWGALEGETREER

SEQ ID NO: 6317 - protein, 5 aa, Homo sapiens
YPGIK

SEQ ID NO: 6318 - protein, 9 aa, Homo sapiens
YPHYFPLLK

SEQ ID NO: 6319 - protein, 16 aa, Homo sapiens
YPIEHGIITNWDDMEK

SEQ ID NO: 6320 - protein, 14 aa, Homo sapiens
YPLVVFSHGLGAFR

SEQ ID NO: 6321 - protein, 7 aa, Homo sapiens
YPLYVLK

SEQ ID NO: 6322 - protein, 14 aa, Homo sapiens
YPPTVSMVEGQGEK

SEQ ID NO: 6323 - protein, 6 aa, Homo sapiens
YPQENK

SEQ ID NO: 6324 - protein, 8 aa, Homo sapiens
YPSIGQLK

SEQ ID NO: 6325 - protein, 19 aa, Homo sapiens
YPSLSIHGIEGAFDEPGTK

SEQ ID NO: 6326 - protein, 12 aa, Homo sapiens
YPVAHFIDQTLK

SEQ ID NO: 6327 - protein, 10 aa, Homo sapiens
YPVGVHFLPK

SEQ ID NO: 6328 - protein, 12 aa, Homo sapiens
YPVYGVQWHPEK

SEQ ID NO: 6329 - protein, 19 aa, Homo sapiens
YQAEFPMSPVTSAHAGTYR

SEQ ID NO: 6330 - protein, 11 aa, Homo sapiens
YQFFVYLQEGK

SEQ ID NO: 6331 - protein, 7 aa, Homo sapiens
YQISVNK

SEQ ID NO: 6332 - protein, 9 aa, Homo sapiens
YQISVNKYR

SEQ ID NO: 6333 - protein, 16 aa, Homo sapiens
YQIWTTVVDWIHPDLK

SEQ ID NO: 6334 - protein, 17 aa, Homo sapiens
YQIWTTVVDWIHPDLKR

SEQ ID NO: 6335 - protein, 13 aa, Homo sapiens
YQSHDYAFSSVEK

SEQ ID NO: 6336 - protein, 14 aa, Homo sapiens
YQYNTDVVFDSQGK

SEQ ID NO: 6337 - protein, 28 aa, Homo sapiens
YRGDQDATMSILDISMMTGFAPDTDDLK

SEQ ID NO: 6338 - protein, 14 aa, Homo sapiens
YSAELHVAHWNSAK

SEQ ID NO: 6339 - protein, 16 aa, Homo sapiens
YSAWAESVTNLPQVIK

SEQ ID NO: 6340 - protein, 15 aa, Homo sapiens
YSDVIAGQFYGHTHR

SEQ ID NO: 6341 - protein, 14 aa, Homo sapiens
YSFCTDHTVLVQTR

SEQ ID NO: 6342 - protein, 8 aa, Homo sapiens
YSFTIELR

SEQ ID NO: 6343 - protein, 19 aa, Homo sapiens
YSHYNERDEIPHNDIALLK

SEQ ID NO: 6344 - protein, 6 aa, Homo sapiens
YSLELK

SEQ ID NO: 6345 - protein, 11 aa, Homo sapiens
YSLEPVAVELK

SEQ ID NO: 6346 - protein, 9 aa, Homo sapiens
YSLNSGAVK

SEQ ID NO: 6347 - protein, 12 aa, Homo sapiens
YSLTYIYTGLSK

SEQ ID NO: 6348 - protein, 6 aa, Homo sapiens
YSLWFK

SEQ ID NO: 6349 - protein, 11 aa, Homo sapiens
YSPGGTPTAIK

SEQ ID NO: 6350 - protein, 5 aa, Homo sapiens
YSPVK

SEQ ID NO: 6351 - protein, 50 aa, Homo sapiens
YSPVKNEEDVAELSISPSDNAVVLTNLLPGTEYVVSVSSVYEQHESTPLR

SEQ ID NO: 6352 - protein, 10 aa, Homo sapiens
YSSLAEAASK

SEQ ID NO: 6353 - protein, 6 aa, Homo sapiens
YSVDEK

SEQ ID NO: 6354 - protein, 8 aa, Homo sapiens
YTACETAR

SEQ ID NO: 6355 - protein, 8 aa, Homo sapiens
YTASGVHK

SEQ ID NO: 6356 - protein, 9 aa, Homo sapiens
YTCLPGYVR

SEQ ID NO: 6357 - protein, 7 aa, Homo sapiens
YTFELSR

SEQ ID NO: 6358 - protein, 7 aa, Homo sapiens
YTGNTYR

SEQ ID NO: 6359 - protein, 16 aa, Homo sapiens
YTHFLTQHYDAKPQGR

SEQ ID NO: 6360 - protein, 27 aa, Homo sapiens
YTHGHGSETLYLAPGGGDDWIYDLGIK

SEQ ID NO: 6361 - protein, 5 aa, Homo sapiens
YTHLK

SEQ ID NO: 6362 - protein, 22 aa, Homo sapiens
YTIAALLSPYSYSTTAVVTNPK

SEQ ID NO: 6363 - protein, 23 aa, Homo sapiens
YTIAALLSPYSYSTTAVVTNPKE

SEQ ID NO: 6364 - protein, 9 aa, Homo sapiens
YTLFQIFSK

SEQ ID NO: 6365 - protein, 14 aa, Homo sapiens
YTLNILEEIGGGQK

SEQ ID NO: 6366 - protein, 5 aa, Homo sapiens
YTLNK

SEQ ID NO: 6367 - protein, 22 aa, Homo sapiens
YTPSGQAGAAASESLFVSNHAY

SEQ ID NO: 6368 - protein, 7 aa, Homo sapiens
YTTEIIK

SEQ ID NO: 6369 - protein, 11 aa, Homo sapiens
YTTTMGVNTYK

SEQ ID NO: 6370 - protein, 13 aa, Homo sapiens
YTTTMGVNTYKAR

SEQ ID NO: 6371 - protein, 7 aa, Homo sapiens
YTVNQCR

SEQ ID NO: 6372 - protein, 20 aa, Homo sapiens
YTYNYEAESSSGVPGTADSR

SEQ ID NO: 6373 - protein, 18 aa, Homo sapiens
YVATLGVEVHPLVFHTNR

SEQ ID NO: 6374 - protein, 15 aa, Homo sapiens
YVGGQEHFAHLLILR

SEQ ID NO: 6375 - protein, 18 aa, Homo sapiens
YVGGQEHFAHLLILRDTK

SEQ ID NO: 6376 - protein, 13 aa, Homo sapiens
YVGNMHGNEALGR

SEQ ID NO: 6377 - protein, 6 aa, Homo sapiens
YVHGVR

SEQ ID NO: 6378 - protein, 9 aa, Homo sapiens
YVLPNFEVK

SEQ ID NO: 6379 - protein, 7 aa, Homo sapiens
YVLSPYK

SEQ ID NO: 6380 - protein, 7 aa, Homo sapiens
YVNEAVK

SEQ ID NO: 6381 - protein, 6 aa, Homo sapiens
YVNWIK

SEQ ID NO: 6382 - protein, 6 aa, Homo sapiens
YVQGLK

SEQ ID NO: 6383 - protein, 17 aa, Homo sapiens
YVRPGGGFVPNFQLFEK

SEQ ID NO: 6384 - protein, 9 aa, Homo sapiens
YVSELHLTR

SEQ ID NO: 6385 - protein, 23 aa, Homo sapiens
YVSHFETEGPHVLLYFDSVPTSR

SEQ ID NO: 6386 - protein, 12 aa, Homo sapiens
YVVISQGLDKPR

SEQ ID NO: 6387 - protein, 11 aa, Homo sapiens
YVYIAELLAHK

SEQ ID NO: 6388 - protein, 17 aa, Homo sapiens
YVYIAELLAHKIHVYEK

SEQ ID NO: 6389 - protein, 10 aa, Homo sapiens
YWGVASFLQK

SEQ ID NO: 6390 - protein, 12 aa, Homo sapiens
YWLYYLHPVLQR

SEQ ID NO: 6391 - protein, 7 aa, Homo sapiens
YYADSVK

SEQ ID NO: 6392 - protein, 15 aa, Homo sapiens
YYAGGCSPHYILNTR

SEQ ID NO: 6393 - protein, 11 aa, Homo sapiens
YYCFQGNQFLR

SEQ ID NO: 6394 - protein, 11 aa, Homo sapiens
YYDFKNPIIEK

SEQ ID NO: 6395 - protein, 7 aa, Homo sapiens
YYELEEK

SEQ ID NO: 6396 - protein, 9 aa, Homo sapiens
YYIAASYVK

SEQ ID NO: 6397 - protein, 6 aa, Homo sapiens
YYIEQK

SEQ ID NO: 6398 - protein, 7 aa, Homo sapiens
YYLQGAK

SEQ ID NO: 6399 - protein, 20 aa, Homo sapiens
YYPYQSFQTPQHPSFLFQDK

SEQ ID NO: 6400 - protein, 21 aa, Homo sapiens
YYPYQSFQTPQHPSFLFQDKR

SEQ ID NO: 6401 - protein, 9 aa, Homo sapiens
YYRAGLLQK

SEQ ID NO: 6402 - protein, 9 aa, Homo sapiens
YYTYLIMNK

SEQ ID NO: 6403 - protein, 13 aa, Homo sapiens
YYWGGQYTWDMAK

SEQ ID NO: 6404 - protein, 6 aa, Homo sapiens
YYYDGK

SEQ ID NO: 6405 - protein, 13 aa, Homo sapiens
YYYDGKDYIEFNK

SEQ ID NO: 6406 - protein, 12 aa, Homo sapiens
AALGVLGPEVEK

SEQ ID NO: 6407 - protein, 13 aa, Homo sapiens
ACIDSNEDGDLSK

SEQ ID NO: 6408 - protein, 15 aa, Homo sapiens
AFGFSHLEALLDDSK

SEQ ID NO: 6409 - protein, 13 aa, Homo sapiens
AFIDVTAAAENIR

SEQ ID NO: 6410 - protein, 12 aa, Homo sapiens
AFSGYLGTDQSK

SEQ ID NO: 6411 - protein, 10 aa, Homo sapiens
AINPINTFTK

SEQ ID NO: 6412 - protein, 16 aa, Homo sapiens
AIYPFDGHNEGTLAMK

SEQ ID NO: 6413 - protein, 13 aa, Homo sapiens
ALGQNPTNAEVLK

SEQ ID NO: 6414 - protein, 14 aa, Homo sapiens
ALPFWNEEIVPQIK

SEQ ID NO: 6415 - protein, 10 aa, Homo sapiens
AMEAVAAQGK

SEQ ID NO: 6416 - protein, 23 aa, Homo sapiens
AMLAAVLEQELPALAENLHQEQK

SEQ ID NO: 6417 - protein, 18 aa, Homo sapiens
APFAAPSPFAELVLPPQQ

SEQ ID NO: 6418 - protein, 16 aa, Homo sapiens
ASAQTLLGDPFLQPGK

SEQ ID NO: 6419 - protein, 13 aa, Homo sapiens
ATDAEADVASLNR

SEQ ID NO: 6420 - protein, 13 aa, Homo sapiens
AVAIDLPGLGHSK

SEQ ID NO: 6421 - protein, 14 aa, Homo sapiens
AYDYLVQNTSFANK

SEQ ID NO: 6422 - protein, 16 aa, Homo sapiens
CGDLEEELKNVTNNLK

SEQ ID NO: 6423 - protein, 10 aa, Homo sapiens
CSQAVYAAEK

SEQ ID NO: 6424 - protein, 15 aa, Homo sapiens
CYTAVVPLVYGGETK

SEQ ID NO: 6425 - protein, 10 aa, Homo sapiens
DAGPLLISLK

SEQ ID NO: 6426 - protein, 12 aa, Homo sapiens
DAVPAFIEPNVR

SEQ ID NO: 6427 - protein, 10 aa, Homo sapiens
DFNVPLSISR

SEQ ID NO: 6428 - protein, 10 aa, Homo sapiens
DGGLICTSCR

SEQ ID NO: 6429 - protein, 12 aa, Homo sapiens
DGNGYISAAELR

SEQ ID NO: 6430 - protein, 16 aa, Homo sapiens
DGWQDIVIGAPQYFDR

SEQ ID NO: 6431 - protein, 9 aa, Homo sapiens
DIAANEENR

SEQ ID NO: 6432 - protein, 16 aa, Homo sapiens
DIALEITVTNSPSNPR

SEQ ID NO: 6433 - protein, 10 aa, Homo sapiens
DIIGLYLEQK

SEQ ID NO: 6434 - protein, 12 aa, Homo sapiens
DLVVQQLVNVSR

SEQ ID NO: 6435 - protein, 11 aa, Homo sapiens
DMAHQVQELFR

SEQ ID NO: 6436 - protein, 16 aa, Homo sapiens
DNSQVNAVTVLTLLDK

SEQ ID NO: 6437 - protein, 12 aa, Homo sapiens
DPNNLLNDWSQK

SEQ ID NO: 6438 - protein, 13 aa, Homo sapiens
DQGTYEDYVEGLR

SEQ ID NO: 6439 - protein, 10 aa, Homo sapiens
DRPFFPGLVK

SEQ ID NO: 6440 - protein, 10 aa, Homo sapiens
DSTLIMQLLR

SEQ ID NO: 6441 - protein, 19 aa, Homo sapiens
DVTATVDSLPLITASILSK

SEQ ID NO: 6442 - protein, 15 aa, Homo sapiens
DVTFSPATIENELIK

SEQ ID NO: 6443 - protein, 16 aa, Homo sapiens
EASMVITESPAALQLR

SEQ ID NO: 6444 - protein, 12 aa, Homo sapiens
EGEVLYIIEEDK

SEQ ID NO: 6445 - protein, 13 aa, Homo sapiens
EGHVETVLALLEK

SEQ ID NO: 6446 - protein, 11 aa, Homo sapiens
EGMNIVEAMER

SEQ ID NO: 6447 - protein, 12 aa, Homo sapiens
EGNGTVMGAEIR

SEQ ID NO: 6448 - protein, 14 aa, Homo sapiens
EGTIQVQGQALFFR

SEQ ID NO: 6449 - protein, 8 aa, Homo sapiens
EHLPLIGK

SEQ ID NO: 6450 - protein, 15 aa, Homo sapiens
EHVNVVFIGHVDAGK

SEQ ID NO: 6451 - protein, 10 aa, Homo sapiens
EIHTVPDMGK

SEQ ID NO: 6452 - protein, 15 aa, Homo sapiens
ELFLTHGNLEEVAEK

SEQ ID NO: 6453 - protein, 11 aa, Homo sapiens
ELGTGQFGVVK

SEQ ID NO: 6454 - protein, 8 aa, Homo sapiens
ELHIQGNR

SEQ ID NO: 6455 - protein, 17 aa, Homo sapiens
ELLMNGTSSTAEAIGLK

SEQ ID NO: 6456 - protein, 12 aa, Homo sapiens
ENAQLLNMPVVK

SEQ ID NO: 6457 - protein, 16 aa, Homo sapiens
EPVQIELSPPMEVVQK

SEQ ID NO: 6458 - protein, 12 aa, Homo sapiens
EQAEAEVASLNR

SEQ ID NO: 6459 - protein, 15 aa, Homo sapiens
ESAGLIPSPELQEWR

SEQ ID NO: 6460 - protein, 12 aa, Homo sapiens
ESQVYLLGTGLR

SEQ ID NO: 6461 - protein, 15 aa, Homo sapiens
ETSGNLEQLLLAVVK

SEQ ID NO: 6462 - protein, 12 aa, Homo sapiens
ETTGVMVLAWDK

SEQ ID NO: 6463 - protein, 9 aa, Homo sapiens
EVAGFVLNR

SEQ ID NO: 6464 - protein, 15 aa, Homo sapiens
EVPFADLSNMEIGMK

SEQ ID NO: 6465 - protein, 12 aa, Homo sapiens
EYAEDDNIYQQK

SEQ ID NO: 6466 - protein, 12 aa, Homo sapiens
FATGDIIQIINK

SEQ ID NO: 6467 - protein, 12 aa, Homo sapiens
FCGWFDAELSEK

SEQ ID NO: 6468 - protein, 17 aa, Homo sapiens
FEQSASNFYQQQAEGHK

SEQ ID NO: 6469 - protein, 10 aa, Homo sapiens
FFEHFIEGGR

SEQ ID NO: 6470 - protein, 14 aa, Homo sapiens
FGGAAVFPNQEQAR

SEQ ID NO: 6471 - protein, 14 aa, Homo sapiens
FGSCQQGVAATFTK

SEQ ID NO: 6472 - protein, 13 aa, Homo sapiens
FGSLLPIHPVTSG

SEQ ID NO: 6473 - protein, 17 aa, Homo sapiens
FLATEVSQFSPSLISEK

SEQ ID NO: 6474 - protein, 12 aa, Homo sapiens
FLLQHQADVNAK

SEQ ID NO: 6475 - protein, 11 aa, Homo sapiens
FLNLTENDIQK

SEQ ID NO: 6476 - protein, 6 aa, Homo sapiens
FNSVEK

SEQ ID NO: 6477 - protein, 12 aa, Homo sapiens
FQDNLDFIQWFK

SEQ ID NO: 6478 - protein, 14 aa, Homo sapiens
FSSETWQNLGTLHR

SEQ ID NO: 6479 - protein, 15 aa, Homo sapiens
FTNSETAEHIAQGLR

SEQ ID NO: 6480 - protein, 15 aa, Homo sapiens
GAEEMETVIPVDVMR

SEQ ID NO: 6481 - protein, 16 aa, Homo sapiens
GAGPGCYLAGSLTLSK

SEQ ID NO: 6482 - protein, 14 aa, Homo sapiens
GDNVLINTFSGLLK

SEQ ID NO: 6483 - protein, 19 aa, Homo sapiens
GEEQSAIPYFPFIPDQPFR

SEQ ID NO: 6484 - protein, 18 aa, Homo sapiens
GEGGTTNPHIFPEGSEPK

SEQ ID NO: 6485 - protein, 10 aa, Homo sapiens
GGAGGGPSGD

SEQ ID NO: 6486 - protein, 17 aa, Homo sapiens
GHIISDGGCSCPGDVAK

SEQ ID NO: 6487 - protein, 17 aa, Homo sapiens
GHTGIKSDSLTLSEFVK

SEQ ID NO: 6488 - protein, 17 aa, Homo sapiens
GILHLSPDVYQEMEASR

SEQ ID NO: 6489 - protein, 16 aa, Homo sapiens
GLGTDEESILTLLTSR

SEQ ID NO: 6490 - protein, 8 aa, Homo sapiens
GLVGEIIK

SEQ ID NO: 6491 - protein, 12 aa, Homo sapiens
GNTSGVLVVLTK

SEQ ID NO: 6492 - protein, 19 aa, Homo sapiens
GPGTSFEFALAIVEALNGK

SEQ ID NO: 6493 - protein, 12 aa, Homo sapiens
GPPASSPAPAPK

SEQ ID NO: 6494 - protein, 13 aa, Homo sapiens
GQGTYEDYLEGFR

SEQ ID NO: 6495 - protein, 20 aa, Homo sapiens
GSAQMDPPQMGPAPTEAVQK

SEQ ID NO: 6496 - protein, 15 aa, Homo sapiens
GSGDSSQVTQVSPQR

SEQ ID NO: 6497 - protein, 13 aa, Homo sapiens
GTLTEAFPVLGGK

SEQ ID NO: 6498 - protein, 12 aa, Homo sapiens
GTVTDFPGFDER

SEQ ID NO: 6499 - protein, 12 aa, Homo sapiens
GVTFNVTTVDTK

SEQ ID NO: 6500 - protein, 14 aa, Homo sapiens
GVVDSEDLPLNISR

SEQ ID NO: 6501 - protein, 15 aa, Homo sapiens
GYGYGQGAGTLSTDK

SEQ ID NO: 6502 - protein, 11 aa, Homo sapiens
HFTILDAPGHK

SEQ ID NO: 6503 - protein, 11 aa, Homo sapiens
HFYVVIPQIYK

SEQ ID NO: 6504 - protein, 14 aa, Homo sapiens
HGLAVGANTILLTK

SEQ ID NO: 6505 - protein, 10 aa, Homo sapiens
HGVMVDATTR

SEQ ID NO: 6506 - protein, 11 aa, Homo sapiens
HIFALFNTEQR

SEQ ID NO: 6507 - protein, 11 aa, Homo sapiens
HLIEQDFPGMR

SEQ ID NO: 6508 - protein, 16 aa, Homo sapiens
HLVNVYYLEEAAQGQE

SEQ ID NO: 6509 - protein, 11 aa, Homo sapiens
HQIVEVAGDDK

SEQ ID NO: 6510 - protein, 26 aa, Homo sapiens
HSDLAALYTIVAVFPSPLAAQNASLR

SEQ ID NO: 6511 - protein, 15 aa, Homo sapiens
HSQFIGYPITLFVEK

SEQ ID NO: 6512 - protein, 18 aa, Homo sapiens
HSSIFDQLDVVSYEEVVR

SEQ ID NO: 6513 - protein, 14 aa, Homo sapiens
HVLQTFGPIPEFSR

SEQ ID NO: 6514 - protein, 9 aa, Homo sapiens
HVLTTLGEK

SEQ ID NO: 6515 - protein, 9 aa, Homo sapiens
HVLVTLGEK

SEQ ID NO: 6516 - protein, 9 aa, Homo sapiens
HVMTNLGEK

SEQ ID NO: 6517 - protein, 11 aa, Homo sapiens
ICLDLQAPLYK

SEQ ID NO: 6518 - protein, 11 aa, Homo sapiens
IFGLGWAIILK

SEQ ID NO: 6519 - protein, 18 aa, Homo sapiens
IFSYLDAVSLLCTGCVSR

SEQ ID NO: 6520 - protein, 12 aa, Homo sapiens
IGDTVSFSIEAK

SEQ ID NO: 6521 - protein, 14 aa, Homo sapiens
IIPGFMCQGGDFTR

SEQ ID NO: 6522 - protein, 20 aa, Homo sapiens
ILAHLTGTEFMQDPDEEHLK

SEQ ID NO: 6523 - protein, 10 aa, Homo sapiens
ILDDWGETCK

SEQ ID NO: 6524 - protein, 11 aa, Homo sapiens
ILYSQCGDVMR

SEQ ID NO: 6525 - protein, 14 aa, Homo sapiens
IMGIPEEEQMGLLR

SEQ ID NO: 6526 - protein, 15 aa, Homo sapiens
INFDSHEPLQSVTNK

SEQ ID NO: 6527 - protein, 10 aa, Homo sapiens
INQDGTFLVR

SEQ ID NO: 6528 - protein, 14 aa, Homo sapiens
IQALQQQADEAEDR

SEQ ID NO: 6529 - protein, 6 aa, Homo sapiens
IQASFR

SEQ ID NO: 6530 - protein, 12 aa, Homo sapiens
IQGFQAALSALK

SEQ ID NO: 6531 - protein, 15 aa, Homo sapiens
IQQEIAVQNPLVSER

SEQ ID NO: 6532 - protein, 14 aa, Homo sapiens
IQSPTEETEIFYHR

SEQ ID NO: 6533 - protein, 11 aa, Homo sapiens
IQTLSAIDTIK

SEQ ID NO: 6534 - protein, 14 aa, Homo sapiens
IQVLQQQADDAEER

SEQ ID NO: 6535 - protein, 21 aa, Homo sapiens
ISSDCDDILHLVTNQSQMIVK

SEQ ID NO: 6536 - protein, 10 aa, Artificial Sequence
  source: /note="Description of Artificial Sequence: Synthetic peptide"
  MOD_RES (9)..(9): Oxidation
ISSLTSEIMK

SEQ ID NO: 6537 - protein, 13 aa, Homo sapiens
ITFDSEQLQEAVK

SEQ ID NO: 6538 - protein, 14 aa, Homo sapiens
KPLPPTPEEDQILK

SEQ ID NO: 6539 - protein, 17 aa, Homo sapiens
LAAPQLIMLANVALTGE

SEQ ID NO: 6540 - protein, 15 aa, Homo sapiens
LALQAQPVPDELVTK

SEQ ID NO: 6541 - protein, 23 aa, Homo sapiens
LCYVALDFEQEMATAASSSSLEK

SEQ ID NO: 6542 - protein, 11 aa, Homo sapiens
LDFKDVLLRPK

SEQ ID NO: 6543 - protein, 16 aa, Homo sapiens
LETTSNQDNLAPITAK

SEQ ID NO: 6544 - protein, 20 aa, Homo sapiens
LEVDSHSLHGPVNDEESSTK

SEQ ID NO: 6545 - protein, 6 aa, Homo sapiens
LEVEGK

SEQ ID NO: 6546 - protein, 14 aa, Homo sapiens
LGVGAELLVDVGQR

SEQ ID NO: 6547 - protein, 15 aa, Homo sapiens
LHQEDNDYINASLIK

SEQ ID NO: 6548 - protein, 17 aa, Homo sapiens
LIHHPDVSVQSVADQPK

SEQ ID NO: 6549 - protein, 15 aa, Homo sapiens
LLDTVDDMLANDIAR

SEQ ID NO: 6550 - protein, 9 aa, Homo sapiens
LLTSGYLQR

SEQ ID NO: 6551 - protein, 13 aa, Homo sapiens
LNHLLTDILADVK

SEQ ID NO: 6552 - protein, 14 aa, Homo sapiens
LNVAEVTQSEIGQK

SEQ ID NO: 6553 - protein, 8 aa, Homo sapiens
LPEGDLGK

SEQ ID NO: 6554 - protein, 11 aa, Homo sapiens
LTDEEVDEMIR

SEQ ID NO: 6555 - protein, 10 aa, Homo sapiens
LVIIEGDLER

SEQ ID NO: 6556 - protein, 14 aa, Homo sapiens
LVINGNPITIFQER

SEQ ID NO: 6557 - protein, 16 aa, Homo sapiens
LVPLVQATFPENAVTK

SEQ ID NO: 6558 - protein, 10 aa, Homo sapiens
LYDIEQQQIR

SEQ ID NO: 6559 - protein, 12 aa, Homo sapiens
MEVDYSATVDQR

SEQ ID NO: 6560 - protein, 11 aa, Homo sapiens
MGLIQTADQLR

SEQ ID NO: 6561 - protein, 13 aa, Homo sapiens
MMNGGHYTYSENR

SEQ ID NO: 6562 - protein, 14 aa, Homo sapiens
MYAPAWVAPEALQK

SEQ ID NO: 6563 - protein, 13 aa, Homo sapiens
NAAEAMLLQLGYK

SEQ ID NO: 6564 - protein, 14 aa, Homo sapiens
NDASHLLVFTTDAK

SEQ ID NO: 6565 - protein, 13 aa, Homo sapiens
NGVAPGAQILSIK

SEQ ID NO: 6566 - protein, 16 aa, Homo sapiens
NHEEFFSNMDCTQEEK

SEQ ID NO: 6567 - protein, 17 aa, Homo sapiens
NLDSTTVAVHGEEIYCK

SEQ ID NO: 6568 - protein, 12 aa, Homo sapiens
NPEQEPIPIVLR

SEQ ID NO: 6569 - protein, 20 aa, Homo sapiens
NSTIVFPLPIDMLQGIIGAK

SEQ ID NO: 6570 - protein, 13 aa, Homo sapiens
NSVSQISVLSGGK

SEQ ID NO: 6571 - protein, 14 aa, Homo sapiens
NVTELNEPLSNEER

SEQ ID NO: 6572 - protein, 13 aa, Homo sapiens
QDHLSWEWNLSIK

SEQ ID NO: 6573 - protein, 18 aa, Homo sapiens
QFSEQGLDPIDGAMNIEK

SEQ ID NO: 6574 - protein, 20 aa, Homo sapiens
QGQDAIPPPDPGEQIFNLPK

SEQ ID NO: 6575 - protein, 10 aa, Homo sapiens
QIDLSTVDLK

SEQ ID NO: 6576 - protein, 14 aa, Homo sapiens
QLEEDLYDGQVLQK

SEQ ID NO: 6577 - protein, 13 aa, Homo sapiens
QLELENLTTQETR

SEQ ID NO: 6578 - protein, 11 aa, Homo sapiens
QLILPALGSGK

SEQ ID NO: 6579 - protein, 18 aa, Homo sapiens
QLLCTNEDVSSPASADQR

SEQ ID NO: 6580 - protein, 19 aa, Homo sapiens
QNGEEGYVPTSYIDVTLEK

SEQ ID NO: 6581 - protein, 12 aa, Homo sapiens
QQDVLGFLEANK

SEQ ID NO: 6582 - protein, 6 aa, Artificial Sequence
  source: /note="Description of Artificial Sequence: Synthetic peptide"
  MOD_RES (1)..(1): Deamidated
QQLNLR

SEQ ID NO: 6583 - protein, 15 aa, Homo sapiens
SASTDLGTADVVLGR

SEQ ID NO: 6584 - protein, 9 aa, Homo sapiens
SCFLCMVCK

SEQ ID NO: 6585 - protein, 20 aa, Homo sapiens
SGFEPPGDFPFEDYSQHIYR

SEQ ID NO: 6586 - protein, 16 aa, Homo sapiens
SGKPILEGAALDEALK

SEQ ID NO: 6587 - protein, 12 aa, Homo sapiens
SGSWAAIYQDIR

SEQ ID NO: 6588 - protein, 22 aa, Homo sapiens
SGYHQSASEHGLVVIAPDTSPR

SEQ ID NO: 6589 - protein, 15 aa, Homo sapiens
SLATVHPDSSNLIPK

SEQ ID NO: 6590 - protein, 12 aa, Homo sapiens
SLMASEEEYSTK

SEQ ID NO: 6591 - protein, 12 aa, Homo sapiens
SSEDPNEDIVER

SEQ ID NO: 6592 - protein, 10 aa, Homo sapiens
STCTYVGAAK

SEQ ID NO: 6593 - protein, 16 aa, Homo sapiens
STIGGQIMYLTGMVDK

SEQ ID NO: 6594 - protein, 11 aa, Homo sapiens
SVMIDEDMTAR

SEQ ID NO: 6595 - protein, 16 aa, Homo sapiens
SYELPDGQVITIGNER

SEQ ID NO: 6596 - protein, 15 aa, Homo sapiens
SYPGSQLDILIDQGK

SEQ ID NO: 6597 - protein, 20 aa, Homo sapiens
TATVSSPLTSPTSPSTLSLK

SEQ ID NO: 6598 - protein, 22 aa, Homo sapiens
TEGNIFDSLIGGNASAEGPEGK

SEQ ID NO: 6599 - protein, 6 aa, Homo sapiens
TETQEK

SEQ ID NO: 6600 - protein, 12 aa, Homo sapiens
TFDAQIVIIEHK

SEQ ID NO: 6601 - protein, 15 aa, Homo sapiens
TGLFTPDMAFEAIVK

SEQ ID NO: 6602 - protein, 17 aa, Homo sapiens
TQIAICPNNHEVHIYEK

SEQ ID NO: 6603 - protein, 21 aa, Homo sapiens
TSLDSGVPHYSVTEPQVAVNK

SEQ ID NO: 6604 - protein, 8 aa, Homo sapiens
TTSQVRPR

SEQ ID NO: 6605 - protein, 17 aa, Homo sapiens
TVYFAEEVQCEGNSFHK

SEQ ID NO: 6606 - protein, 16 aa, Homo sapiens
VAAYFGMDHNVDQTGK

SEQ ID NO: 6607 - protein, 20 aa, Homo sapiens
VASMAQSAPSEAPSCSPFGK

SEQ ID NO: 6608 - protein, 10 aa, Homo sapiens
VDDQIAIVFK

SEQ ID NO: 6609 - protein, 15 aa, Homo sapiens
VDFETFLPMLQAVAK

SEQ ID NO: 6610 - protein, 9 aa, Homo sapiens
VEILCEHPR

SEQ ID NO: 6611 - protein, 16 aa, Homo sapiens
VHLSFGLDCPILGDHK

SEQ ID NO: 6612 - protein, 12 aa, Homo sapiens
VIAAEGEMNASR

SEQ ID NO: 6613 - protein, 13 aa, Homo sapiens
VISGTTLGYLSPK

SEQ ID NO: 6614 - protein, 13 aa, Homo sapiens
VKPFMTGAAEQIK

SEQ ID NO: 6615 - protein, 13 aa, Homo sapiens
VLEVTDLPEGITR

SEQ ID NO: 6616 - protein, 14 aa, Homo sapiens
VLLDWINDVLVEER

SEQ ID NO: 6617 - protein, 11 aa, Homo sapiens
VLPGVDALSNI

SEQ ID NO: 6618 - protein, 11 aa, Homo sapiens
VPDDPEHLAAR

SEQ ID NO: 6619 - protein, 14 aa, Homo sapiens
VPTANVSVVDLTCR

SEQ ID NO: 6620 - protein, 15 aa, Homo sapiens
VPVGDQPPDIEYQIR

SEQ ID NO: 6621 - protein, 18 aa, Homo sapiens
VRGTDPVSTVTLSLLEPE

SEQ ID NO: 6622 - protein, 11 aa, Homo sapiens
VSEDDETQPEK

SEQ ID NO: 6623 - protein, 15 aa, Homo sapiens
VSLVLAPALAACGCK

SEQ ID NO: 6624 - protein, 17 aa, Homo sapiens
VSSGYVPPPVATPFSSK

SEQ ID NO: 6625 - protein, 15 aa, Homo sapiens
VSVGEFSAEGEGNSK

SEQ ID NO: 6626 - protein, 12 aa, Homo sapiens
VVLEGPAPWGFR

SEQ ID NO: 6627 - protein, 13 aa, Homo sapiens
VYIASSSGSTAIK

SEQ ID NO: 6628 - protein, 21 aa, Homo sapiens
WGDAGAEYVVESTGVFTTMEK

SEQ ID NO: 6629 - protein, 7 aa, Homo sapiens
WHSLIAK

SEQ ID NO: 6630 - protein, 9 aa, Homo sapiens
WSASGPWIR

SEQ ID NO: 6631 - protein, 13 aa, Homo sapiens
WSTLVEDYGMELR

SEQ ID NO: 6632 - protein, 9 aa, Homo sapiens
YAGGVAEYR

SEQ ID NO: 6633 - protein, 16 aa, Homo sapiens
YAGLKPGELPTCESLK

SEQ ID NO: 6634 - protein, 17 aa, Homo sapiens
YEDICPSTHNMDVPNIK

SEQ ID NO: 6635 - protein, 14 aa, Homo sapiens
YEGSYALTSEEAER

SEQ ID NO: 6636 - protein, 17 aa, Homo sapiens
YLSQEEQSTAALTLYTK

SEQ ID NO: 6637 - protein, 16 aa, Homo sapiens
YPIEHGIVTNWDDMEK

SEQ ID NO: 6638 - protein, 11 aa, Homo sapiens
YTFAPSVSLNK

SEQ ID NO: 6639 - protein, 14 aa, Homo sapiens
YVLDDEYTSSVGSK

SEQ ID NO: 6640 - protein, 14 aa, Homo sapiens
YYTSASGDEMVSLK

SEQ ID NO: 6641 - protein, 15 aa, Artificial Sequence
  source: /note="Description of Artificial Sequence: Synthetic heavy-isotope-labeled peptide"
TGEGFLCVFAINNTK

SEQ ID NO: 6642 - protein, 9 aa, Artificial Sequence
  source: /note="Description of Artificial Sequence: Synthetic heavy-isotope-labeled peptide"
SFEDIHHYR

SEQ ID NO: 6643 - protein, 13 aa, Artificial Sequence
  source: /note="Description of Artificial Sequence: Synthetic heavy-isotope-labeled peptide"
DSEDVPMVLVGNK

SEQ ID NO: 6644 - protein, 12 aa, Artificial Sequence
  source: /note="Description of Artificial Sequence: Synthetic heavy-isotope-labeled peptide"
SYGIPFIETSAK

SEQ ID NO: 6645 - protein, 10 aa, Artificial Sequence
  source: /note="Description of Artificial Sequence: Synthetic heavy-isotope-labeled peptide"
VEDAFYTLVR

SEQ ID NO: 6646 - protein, 11 aa, Artificial Sequence
  source: /note="Description of Artificial Sequence: Synthetic heavy-isotope-labeled peptide"
LVVVGADGVGK

1. A method for treating ovarian cancer, said method comprising:
detecting an elevated level of one or more peptide biomarkers comprising a peptide fragment derived from a peptidyl-prolyl cis-trans isomerase A (PPIA) polypeptide in a blood sample obtained from a mammal; and
administering one or more cancer treatments to said mammal.

2. The method of claim 1, wherein said one or more cancer treatments are selected from the group consisting of: surgery, chemotherapy, hormone therapy, targeted therapy, radiation therapy, and combinations thereof.

3. A method of identifying a mammal as having ovarian cancer, said method comprising:
detecting a level of one or more blood peptide-biomarkers comprising a peptide fragment derived from a peptidyl-prolyl cis-trans isomerase A (PPIA) polypeptide in a blood sample obtained from said mammal; and
diagnosing said mammal with ovarian cancer when an elevated level of the one or more blood peptide-biomarkers is detected in said blood sample.

4. The method of claim 1, wherein said mammal is a human.

5. The method of claim 1, wherein said blood sample is a plasma sample.

6. The method of claim 1, wherein said PPIA peptide fragment comprises the amino acid sequence VSFELFADK (SEQ ID NO: 1).

7. The method of claim 1, wherein said PPIA peptide fragment comprises the amino acid sequence FEDENFILK (SEQ ID NO: 2).

8. A method for identifying a peptide biomarker, said method comprising:
digesting polypeptides present in a disease blood sample to obtain disease peptide fragments;
labeling said disease peptide fragments with a first heavy isotope to obtain labeled disease peptide fragments;
digesting polypeptides present in a reference blood sample to obtain reference peptide fragments;
labeling said reference peptide fragments with a second heavy isotope to obtain labeled reference peptide fragments;
subjecting the labeled disease peptide fragments and the labeled reference peptide fragments to mass spectrometry to identify a peptide biomarker, wherein the level of said peptide biomarker is elevated in the labeled disease peptide fragments relative to the labeled reference peptide fragments.

9. The method of claim 8, wherein said disease blood sample comprises blood from one or more mammals having said disease.

10. (canceled)

11. The method of claim 8, wherein said reference blood sample comprises blood from one or more healthy mammals.

12. (canceled)

13. The method of claim 8, wherein said method further comprises depleting one or more highly abundant blood proteins from each sample.

14. The method of claim 13, wherein said highly abundant blood proteins are selected from the group consisting of: albumin, IgG, α1-antitrypsin, IgA, IgM, transferrin, haptoglobin, α2-macroglobulin, fibrinogen, complement C3, α1-acid glycoprotein, apolipoprotein A-1, apolipoprotein A-II, apolipoprotein B, and combinations thereof.

15. The method of claim 8, wherein said method further comprises, prior to each digestion step, enriching glycoproteins in each sample.

16. The method of claim 8, wherein said mass spectrometry is performed using an Orbitrap mass spectrometer.

17. A method for validating a peptide biomarker, said method comprising:
subjecting a plurality of peptides comprising said peptide biomarker to basic pH reversed-phase liquid chromatography (bRPLC) to obtain a plurality of fractions;
organizing said plurality of fractions into a plurality of fraction groups, wherein the number of fractions is higher than the number of fraction groups;
separating peptide biomarkers in each fraction group by orthogonal high performance liquid chromatography (HPLC) at acidic pH to obtain continuous HPLC elutes; and
analyzing said continuous HPLC elutes using a selected reaction monitoring (SRM) method comprising preoptimized transitions and preoptimized dwell times for said peptide biomarker to determine the intensity of said peptide biomarker;
wherein the peptide biomarker is validated when the peptide biomarker is detected and quantitated at an elevated level in a disease sample relative to a reference sample using said SRM method.

18. A method for identifying and validating a peptide biomarker, said method comprising:
(A) identifying a candidate peptide biomarker, wherein said identifying comprises:
(i) digesting polypeptides present in a disease blood sample to obtain disease peptide fragments;
(ii) labeling said disease peptide fragments with a first heavy isotope to obtain labeled disease peptide fragments;
(iii) digesting polypeptides present in a reference blood sample to obtain reference peptide fragments;
(iv) labeling said reference peptide fragments with a second heavy isotope to obtain labeled reference peptide fragments;
(v) subjecting the labeled disease peptide fragments and the labeled reference peptide fragments to mass spectrometry to identify a candidate peptide biomarker, wherein the level of said candidate peptide biomarker is elevated in the labeled disease peptide fragments relative to the labeled reference peptide fragments;
(B) building a SAFE-SRM method, wherein said building comprises:
(i) synthesizing said candidate peptide biomarker;
(ii) subjecting said synthetic candidate peptide biomarker to mass spectrometry to determine a candidate peptide biomarker transition, wherein said transition is determined by identifying a precursor-product ion pair having a strongest intensity and identifying a collision energy (CE) producing said precursor-product ion pair;
(iii) subjecting a plurality of peptides comprising said candidate peptide biomarker to basic pH reversed-phase liquid chromatography (bRPLC) to obtain a plurality of fractions, wherein said plurality consists of essentially equal amounts of each peptide;
(iv) organizing said plurality of fractions into a plurality of fraction groups, wherein the number of fractions is higher than the number of fraction groups;
(v) determining an intensity of said candidate peptide biomarker in each of said fraction groups using the candidate peptide biomarker transition and a fixed dwell time; and
(vi) optimizing the dwell time by re-assembling the transitions according to their hydrophobicity at high pH; and
(C) validating said candidate peptide biomarker, wherein said validating comprises:
(i) quantitating said candidate peptide biomarker in said disease blood sample, said quantitating comprising:
(a) subjecting said disease peptide fragments comprising said candidate peptide biomarkers to bRPLC to obtain a plurality of fractions;
(b) organizing said plurality of fractions into a plurality of fraction groups, wherein the number of fractions is higher than the number of fraction groups;
(c) separating peptides in each fraction group by orthogonal HPLC at acidic pH to obtain continuous HPLC elutes; and
(d) analyzing said continuous HPLC elutes using a SRM method comprising said candidate peptide biomarker transition and said optimized dwell time;
(ii) quantitating said candidate peptide marker in said reference blood sample, said quantitating comprising:
(a) subjecting said reference peptide fragments to bRPLC to obtain a plurality of fractions;
(b) organizing said plurality of fractions into a plurality of fraction groups, wherein the number of fractions is higher than the number of fraction groups;
(c) separating peptides in each fraction group by orthogonal HPLC at acidic pH to obtain continuous HPLC elutes;
(d) analyzing said continuous HPLC elutes using said SRM method comprising said candidate peptide biomarker transition and said optimized dwell time; and
(iii) validating said candidate peptide biomarker when the candidate peptide biomarker is quantitated at an elevated level in said disease sample relative to said reference sample.

19. The method of claim 18, wherein said synthesized candidate peptide biomarkers are not labeled with a heavy isotope.

20. The method of claim 18 wherein the optimized dwell time for the peptide biomarker is determined using synthetic biomarker peptides spiked and present in a sample obtained from a subject.

21. The method of claim 18, wherein said optimized dwell time for the peptide biomarker is inversely proportional to the intensity of the peptide biomarker.

22. The method of claim 18, wherein said HPLC is performed with a device, which device is coupled to a mass spectrometer.

23. The method of claim 22, wherein said mass spectrometer is a triple quadrupole mass spectrometer.

24. The method of claim 18, wherein the collision energy is any one of the collision energies in Dataset S5.

25. The method claim 18, wherein the dwell time is any one of the dwell times in Dataset S5.
